(19) United States
(12) Patent Application Publication
(10) Pub. No.: US 2025/0092155 A1
(43) Pub. Date: Mar. 20, 2025

(54) CANCER ASSOCIATED ANTIBODY COMPOSITIONS AND METHODS OF USE

(71) Applicant: ABSCI CORPORATION, Vancouver, WA (US)

(72) Inventors: Daniele Biasci, Athens (GR); Goran Rakocevic, Vancouver, WA (US); Berke Cagkan Toptas, Cambridge, MA (US); Ines De Santiago Domingos De Jesus, London (GB)

(21) Appl. No.: 18/893,664

(22) Filed: Sep. 23, 2024

Related U.S. Application Data
(63) Continuation of application No. 17/606,246, filed on Oct. 25, 2021, now Pat. No. 12,134,655.
(60) Provisional application No. 62/840,638, filed on Apr. 30, 2019.
(60) Provisional application No. 62/840,640, filed on Apr. 30, 2019.
(60) Provisional application No. 62/840,644, filed on Apr. 30, 2019.
(60) Provisional application No. 62/840,648, filed on Apr. 30, 2019.
(60) Provisional application No. 62/840,855, filed on Apr. 30, 2019.
(60) Provisional application No. 62/840,858, filed on Apr. 30, 2019.
(60) Provisional application No. 62/840,860, filed on Apr. 30, 2019.
(60) Provisional application No. 62/840,861, filed on Apr. 30, 2019.
(60) Provisional application No. 62/840,864, filed on Apr. 30, 2019.
(60) Provisional application No. 62/840,870, filed on Apr. 30, 2019.
(60) Provisional application No. 62/840,875, filed on Apr. 30, 2019.
(60) Provisional application No. 62/840,880, filed on Apr. 30, 2019.
(60) Provisional application No. 62/840,893, filed on Apr. 30, 2019.
(60) Provisional application No. 62/840,904, filed on Apr. 30, 2019.
(60) Provisional application No. 62/840,909, filed on Apr. 30, 2019.
(60) Provisional application No. 62/840,917, filed on Apr. 30, 2019.
(60) Provisional application No. 62/840,938, filed on Apr. 30, 2019.
(60) Provisional application No. 62/840,950, filed on Apr. 30, 2019.
(60) Provisional application No. 62/840,957, filed on Apr. 30, 2019.
(60) Provisional application No. 62/840,970, filed on Apr. 30, 2019.
(60) Provisional application No. 62/841,036, filed on Apr. 30, 2019.
(60) Provisional application No. 62/841,044, filed on Apr. 30, 2019.
(60) Provisional application No. 62/841,047, filed on Apr. 30, 2019.
(60) Provisional application No. 62/841,049, filed on Apr. 30, 2019.

(51) Int. Cl. C07K 16/32; C07K 16/30

(52) U.S. Cl. CPC C07K 16/32; C07K 16/30; C07K 2317/10

(57) ABSTRACT

The disclosure herein relates to novel cancer-associated antibodies and antigen-binding fragments that are used in the diagnosis of a cancer or a metastasis thereof. The disclosure herein relates to novel cancer-associated antibodies and antigen-binding fragments that are used in the treatment of a cancer or a metastasis thereof. The disclosure herein relates to novel chimeric antigen receptor or a T cell receptor fusion protein that comprise one or more cancer-associated antigen-binding domains that are useful for the treatment of a cancer.

### CROSS-REFERENCE

[0001] This application claims the benefit of U.S. Provisional Application No. 62/840,638, filed Apr. 30, 2019, U.S. Provisional Application No. 62/840,640, filed Apr. 30, 2019, U.S. Provisional Application No. 62/840,644, filed Apr. 30, 2019, U.S. Provisional Application No. 62/840,648, filed Apr. 30, 2019, U.S. Provisional Application No. 62/840,855, filed Apr. 30, 2019, U.S. Provisional Application No. 62/840,858, filed Apr. 30, 2019, U.S. Provisional Application No. 62/840,860, filed Apr. 30, 2019, U.S. Provisional Application No. 62/840,861, filed Apr. 30, 2019, U.S. Provisional Application No. 62/840,864, filed Apr. 30, 2019, U.S. Provisional Application No. 62/840,870, filed Apr. 30, 2019, U.S. Provisional Application No. 62/840,875, filed Apr. 30, 2019, U.S. Provisional Application No. 62/840,880, filed Apr. 30, 2019, U.S. Provisional Application No. 62/840,893, filed Apr. 30, 2019, U.S. Provisional Application No. 62/840,904, filed Apr. 30, 2019, U.S. Provisional Application No. 62/840,909, filed Apr. 30, 2019, U.S. Provisional Application No. 62/840,917, filed Apr. 30, 2019, U.S. Provisional Application No. 62/840,938, filed Apr. 30, 2019, U.S. Provisional Application No. 62/840,950, filed Apr. 30, 2019, U.S. Provisional Application No. 62/840,957, filed Apr. 30, 2019, U.S. Provisional Application No. 62/840,970, filed Apr. 30, 2019, U.S. Provisional Application No. 62/841,036, filed Apr. 30, 2019, U.S. Provisional Application No. 62/841,044, filed Apr. 30, 2019, U.S. Provisional Application No. 62/841,047, filed Apr. 30, 2019, and U.S. Provisional Application No. 62/841,049, filed Apr. 30, 2019; each of which application is incorporated herein by reference in their entirety.

### REFERENCE TO A SEQUENCE LISTING

[0002] The present application includes a Sequence Listing which has been submitted electronically in ASCII format and is hereby incorporated by reference in its entirety. Said ASCII copy, created on Apr. 28, 2020, is named 54407_705_601_Sequence_Listing.txt and is 4,053,188 bytes in size.

### BACKGROUND OF THE INVENTION

[0003] While the role of cytotoxic T cells in mediating immune responses against cancer is well established, the role of B cells is less known. In particular, the effect of antibodies identified in cancer patients is still unclear: while some studies suggested that such antibodies might promote tumor progression, others have reported that they might stimulate anti-tumor immunity.

### SUMMARY OF THE INVENTION

[0004] In one aspect, provided herein is an antibody or antigen-binding fragment thereof that comprises at least one of a variable heavy chain complementarity-determining region 1 (CDR-H1), a CDR-H2 and a CDR-H3, wherein: the CDR-H1 comprises a reconstructed polypeptide consensus sequence selected from any one of SEQ ID NOs: 543-813, the CDR-H2 comprises a reconstructed polypeptide consensus sequence selected from any one of SEQ ID NOs: 1085-1355, and the CDR-H3 comprises a reconstructed polypeptide consensus sequence selected from any one of SEQ ID NOs: 1627-1897.

[0005] In one aspect provided herein is an antibody or antigen-binding fragment thereof that comprises at least one of a variable light chain complementarity-determining region 1 (CDR-L1), a CDR-L2 and a CDR-L3, wherein: the CDR-L1 comprises a reconstructed polypeptide consensus sequence selected from any one of SEQ ID NOs: 814-1084, the CDR-L2 comprises a reconstructed polypeptide consensus sequence selected from any one of SEQ ID NOs: 1356-1626, and the CDR-L3 comprises a reconstructed polypeptide consensus sequence selected from any one of SEQ ID NOs: 1898-2168.

[0006] In one aspect provided herein is an antibody or antigen-binding fragment thereof that comprises: a variable heavy chain complementarity-determining region 1 (CDR-H1), a CDR-H2 and a CDR-H3, wherein: the CDR-H1 comprises a reconstructed polypeptide consensus sequence selected from any one of SEQ ID NOs: 543-813, the CDR-H2 comprises a reconstructed polypeptide consensus sequence selected from any one of SEQ ID NOs: 1085-1355, and the CDR-H3 comprises a reconstructed polypeptide consensus sequence selected from any one of SEQ ID NOs: 1627-1897; and a variable light chain complementarity-determining region 1 (CDR-L1), a CDR-L2, and a CDR-L3, wherein: the CDR-L1 comprises a reconstructed polypeptide consensus sequence selected from any one of SEQ ID NOs: 814-1084, the CDR-L2 comprises a reconstructed polypeptide consensus sequence selected from any one of SEQ ID NOs: 1356-1626, and the CDR-L3 comprises a reconstructed polypeptide consensus sequence selected from any one of SEQ ID NOs: 1898-2168.

[0007] In some embodiments, the antibody comprises an IgG, IgA, or IgM antibody. In some embodiments, the IgG comprises IgG1, IgG2, IgG3, IgG4, IgGA1, or IgGA2. In some embodiments, the antibody comprises a chimeric antibody, a humanized antibody, a human antibody, a monoclonal antibody, a deimmunized antibody, a bispecific antibody, a multispecific antibody, a multivalent antibody, or a combination thereof. In some embodiments, the antigen-binding fragment comprises a Fab, Fab′, Fab′-SH, Fv, scFv, F(ab′)2, a diabody, a linear antibody, a single domain antibodies (sdAb), a camelid VHH domain, or a multi-specific antibody formed from antibody fragments. In some embodiments, the antibody or antigen-binding fragment thereof is recombinant or synthetic. In some embodiments, the antibody or antigen-binding fragment thereof further comprises an enzyme, a substrate, cofactor, a fluorescent marker, a chemiluminescent marker, a peptide tag, a magnetic particle, a drug, a toxin, or a combination thereof. In some embodiments, the antibody or antigen-binding fragment thereof is cytolytic to a tumor cell or a cancer cell. In some embodiments, the antibody or antigen-binding fragment thereof inhibits tumor growth or cancer cell growth.

[0008] In some embodiments, the antibody or an antigen-binding fragment thereof is useful for treating a cancer. In some embodiments, the antibody or antigen-binding fragment thereof of aspect above is useful for treating a bladder cancer, (e.g., bladder urothelial carcinoma, squamous cell carcinoma of the bladder, adenocarcinoma of the bladder, or small cell carcinoma of the bladder), a brain cancer, (e.g., glioma, meningioma pituitary adenoma, vestibular schwannoma, nerve sheath tumor, primitive neuroectodermal tumor (medulloblastoma), ependymomas, astrocytomas, oligodendrogliomas, brainstem glioma, optic nerve glioma, mixed glioma (e.g., oligoastrocytoma), high-grade glioma, or low-grade glioma.), a breast cancer or breast carcinoma, (e.g., invasive ductal carcinoma, ductal carcinoma in situ, invasive lobular carcinoma, lobular carcinoma in situ, inflammatory breast cancer, male breast cancer, phyllodes tumors of the breast, Paget's disease of the nipple, Angiosarcomas, or metastatic breast cancer), a cervical cancer (cervical squamous cell carcinoma, adenocarcinoma, adenosquamous carcinoma, small cell carcinoma, neuroendocrine tumor, glassy cell carcinoma, villoglandular adenocarcinoma, endocervical (NOS) type adenocarcinoma, mucinous adenocarcinoma, minimal deviation adenocarcinoma (mucinous and endometrioid types), enteric/GI type adenocarcinoma, endometrioid type adenocarcinoma, clear cell adenocarcinoma, serous adenocarcinoma, mesonephric adenocarcinoma, adenoid basal carcinoma, or adenoid cystic carcinoma), a cholangiocarcinoma (e.g., intrahepatic cholangiocarcinoma, hilar cholangiocarcinoma, or distal cholangiocarcinoma), a colon or rectal cancer (e.g., colon adenocarcinoma, rectal adenocarcinoma, gastrointestinal carcinoid tumors, primary colorectal lymphomas, gastrointestinal stromal tumors, leiomyosarcomas, melanoma, sarcoma, Turcot syndrome, Peutz-Jeghers syndrome, familial colorectal cancer, or juvenile polyposis coli), an esophageal cancer (e.g., esophageal cancer is squamous cell carcinoma, adenocarcinoma, choriocarcinoma, lymphoma, melanoma, or sarcoma), a head or neck squamous cell cancer (e.g., conventional type squamous cell carcinoma, verrucous carcinoma, basaloid squamous cell carcinoma, papillary squamous cell carcinoma, spindle cell carcinoma, acantholytic squamous cell carcinoma, adenosquamous carcinoma, carcinoma cuniculatum, nasopharyngeal carcinoma, lymphoepithelial carcinoma, laryngeal or hypopharyngeal cancer, nasal cavity or paranasal sinus cancer, nasopharyngeal cancer, oral and oropharyngeal cancer, salivary gland cancer, HPV-negative squamous cell carcinoma, or HPV-induced squamous cell carcinoma), a kidney cancer (e.g., renal cell carcinoma, renal pelvis carcinoma, transitional cell carcinoma, squamous cell carcinoma, juxtaglomerular cell tumor (reninoma), angiomyolipoma, bellini duct carcinoma, clear cell sarcoma of the kidney, mesoblastic nephroma, Wilms' tumor, mixed epithelial stromal tumor, clear cell adenocarcinoma, inverted papilloma, renal lymphoma, teratoma, carcinosarcoma, carcinoid tumor of the renal pelvis, kidney renal clear cell carcinoma, kidney renal papillary cell carcinoma sarcomotoid renal cell carcinoma, chromophobe renal cell carcinoma, renal medullary carcinoma, collecting duct renal cell carcinoma, unclassified renal cell carcinoma, renal oncocytoma, angiomyolipoma, or clear cell papillary carcinoma), a liver cancer (e.g., hepatocellular carcinoma, fibrolamellar hepatocellular carcinoma, cholangiocarcinoma, mucinous cystic neoplasm, intraductal papillary biliary neoplasm, hepatoblastoma, cholangiocellular cystadenocarcinoma, angiosarcoma, hemangioendothelioma, embryonal sarcoma, fibrosarcoma, leiomyosarcoma, rhabdomyosarcoma, carcinosarcomas, teratomas, yolk sac tumours, carcinoid tumours, lymphomas, or liver metastasis), a lung cancer (e.g., non-small cell lung carcinoma, small-cell lung carcinoma, lung adenocarcinoma, lung squamous cell carcinoma, large cell carcinoma, carcinoid tumors, bronchial gland carcinoma, carcinosarcoma, pulmonary blastoma, giant or spindle cell carcinoma, or sarcomatoid carcinoma), a mesothelioma (e.g., malignant mesothelioma, or malignant pleural mesothelioma), a cystadenocarcinoma (e.g., ovarian serous cystadenocarcinoma) an adenocarcinoma (e.g., pancreatic adenocarincoma), a pheochromocytoma or paraganglioma, a prostate adenocarcinoma, a sarcoma, a skin cutaneous melanoma, a stomach adenocarcinoma, a testicular germ cell cancer, a thyroid carcinoma, a uterine cancer (e.g., uterine carcinosarcoma, or uterine corpus endometrial carcinoma), a uveal melanoma.

[0009] In one aspect provided herein is an antibody or antigen-binding fragment thereof comprising: a variable heavy chain, wherein the variable heavy chain comprises a reconstructed polypeptide consensus sequence having at least 95% sequence identity to an amino acid sequence selected from any one of SEQ ID NOs: 1-271; and/or a variable light chain, wherein the variable light chain comprises a reconstructed polypeptide consensus sequence having at least 95% sequence identity to an amino acid sequence selected from any one of SEQ ID NOs: 272-542.

[0010] In one aspect provided herein is a hybridoma that produces the antibody or antigen-binding fragment thereof of any one of aspects above.

[0011] Provided herein is a fusion protein that comprises the antibody or antigen-binding fragment thereof of any one of aspects above.

[0012] Provided herein is a chimeric antigen receptor or a T cell receptor fusion protein that comprises: an antigen-binding fragment of any one of aspects above.; a transmembrane domain; and an intracellular signaling domain.

[0013] Provided herein is a T cell receptor fusion protein that comprises: the antibody or antigen-binding fragment thereof of any one of aspects above.; and a T cell receptor (TCR) subunit. In some embodiments, the antibody or antigen binding fragment thereof comprises a human or humanized anti-cancer antigen binding domain. In some embodiments, the TCR subunit comprises; at least a portion of a TCR extracellular domain, a transmembrane domain; and a TCR intracellular domain comprising a stimulatory domain from an intracellular signaling domain. In some embodiments, the extracellular, transmembrane, and intracellular signaling domains of the TCR subunit are either derived from only CD3 epsilon or only CD3 gamma. In some embodiments, the antibody or antigen-binding fragment thereof and the TCR extracellular domain are connected by a linker sequence. In some embodiments, the linker sequence comprises the sequence of (G4S)n, wherein G is glycine, S is serine, and n=1 to 4.

[0014] Provided herein is an isolated recombinant nucleic acid molecule encoding the T cell receptor fusion protein of any one of aspects above.

[0015] Provided herein is a vector that comprises the isolated recombinant nucleic acid molecule described above.

[0016] Provided herein is a host cell that comprises the isolated recombinant nucleic acid described above or the vector described above. In some embodiments, the host cell is a T cell.

[0017] Provided herein is a T cell expressing the T cell receptor fusion protein of any one of aspects above. In some embodiments, the T cell receptor fusion protein is functionally integrated with an endogenous T cell receptor. In some embodiments, the T cell is a CD8+ or CD4+ T-cell.

[0018] Provided herein is an immunoconjugate comprising the antibody or the antigen binding fragment thereof of any one of aspects above, and a therapeutic agent.

[0019] Provided herein is a pharmaceutical composition or a medicament that comprises the antibody or antigen-binding fragment thereof of any one of aspects above and a pharmaceutically acceptable carrier, excipient or diluent. In some embodiments, the pharmaceutical composition described above further comprises a second therapeutic agent. In some embodiments, the second therapeutic agent comprises a cancer chemotherapeutic agent, radiation therapy, a cytotoxic agent, another antibody, a NSAID, a corticosteroid, a dietary supplement such as an antioxidant, or a combination thereof. In some embodiments, the second therapeutic agent comprises a cancer chemotherapeutic agent. In some embodiments, the pharmaceutical composition of any one of aspects above is, formulated for administration via a subcutaneous, intravenous, intradermal, intraperitoneal, intramuscular, intracerebroventricular, intracranial, intracelial, or intracerebellar administration route. In some embodiments, the pharmaceutical composition of any one of aspects above is, in an aqueous or in a lyophilized form. In some embodiments, the pharmaceutical composition of any one of aspects above, contained in a delivery device selected from the group consisting of a syringe, a blunt tip syringe, a catheter, and an implantable pump.

[0020] Provided herein is a use of the antibody or antigen binding fragment of any one of aspects above for treating a cancer.

[0021] Provided herein is a use of the antibody or antigen binding fragment of any one of aspects above or immunoconjugate described above in the manufacture of a medicament. In some embodiments, the medicament is for treatment of a cancer.

[0022] Provided herein is a method for treating a subject suffering from a cancer, the method comprising administering to the subject a therapeutically effective amount of the antibody or antigen-binding fragment thereof of any one of aspects above. In some embodiments, the antibody or antigen-binding fragment thereof is cytolytic to a tumor cell. In some embodiments, the antibody or antigen-binding fragment thereof inhibits tumor growth.

[0023] In some embodiments, the cancer is a bladder cancer, (e.g., bladder urothelial carcinoma, squamous cell carcinoma of the bladder, adenocarcinoma of the bladder, or small cell carcinoma of the bladder), a brain cancer, (e.g., glioma, meningioma pituitary adenoma, vestibular schwannoma, nerve sheath tumor, primitive neuroectodermal tumor (medulloblastoma), ependymomas, astrocytomas, oligodendrogliomas, brainstem glioma, optic nerve glioma, mixed glioma (e.g., oligoastrocytoma), high-grade glioma, or low-grade glioma.), a breast cancer or breast carcinoma, (e.g., invasive ductal carcinoma, ductal carcinoma in situ, invasive lobular carcinoma, lobular carcinoma in situ, inflammatory breast cancer, male breast cancer, phyllodes tumors of the breast, Paget's disease of the nipple, Angiosarcomas, or metastatic breast cancer), a cervical cancer (cervical squamous cell carcinoma, adenocarcinoma, adenosquamous carcinoma, small cell carcinoma, neuroendocrine tumor, glassy cell carcinoma, villoglandular adenocarcinoma, endocervical (NOS) type adenocarcinoma, mucinous adenocarcinoma, minimal deviation adenocarcinoma (mucinous and endometrioid types), enteric/GI type adenocarcinoma, endometrioid type adenocarcinoma, clear cell adenocarcinoma, serous adenocarcinoma, mesonephric adenocarcinoma, adenoid basal carcinoma, or adenoid cystic carcinoma), a cholangiocarcinoma (e.g., intrahepatic cholangiocarcinoma, hilar cholangiocarcinoma, or distal cholangiocarcinoma), a colon or rectal cancer (e.g., colon adenocarcinoma, rectal adenocarcinoma, gastrointestinal carcinoid tumors, primary colorectal lymphomas, gastrointestinal stromal tumors, leiomyosarcomas, melanoma, sarcoma, Turcot syndrome, Peutz-Jeghers syndrome, familial colorectal cancer, or juvenile polyposis coli), an esophageal cancer (e.g., esophageal cancer is squamous cell carcinoma, adenocarcinoma, choriocarcinoma, lymphoma, melanoma, or sarcoma), a head or neck squamous cell cancer (e.g., conventional type squamous cell carcinoma, verrucous carcinoma, basaloid squamous cell carcinoma, papillary squamous cell carcinoma, spindle cell carcinoma, acantholytic squamous cell carcinoma, adenosquamous carcinoma, carcinoma cuniculatum, nasopharyngeal carcinoma, lymphoepithelial carcinoma, laryngeal or hypopharyngeal cancer, nasal cavity or paranasal sinus cancer, nasopharyngeal cancer, oral and oropharyngeal cancer, salivary gland cancer, HPV-negative squamous cell carcinoma, or HPV-induced squamous cell carcinoma), a kidney cancer (e.g., renal cell carcinoma, renal pelvis carcinoma, transitional cell carcinoma, squamous cell carcinoma, juxtaglomerular cell tumor (reninoma), angiomyolipoma, bellini duct carcinoma, clear cell sarcoma of the kidney, mesoblastic nephroma, Wilms' tumor, mixed epithelial stromal tumor, clear cell adenocarcinoma, inverted papilloma, renal lymphoma, teratoma, carcinosarcoma, carcinoid tumor of the renal pelvis, kidney renal clear cell carcinoma, kidney renal papillary cell carcinoma sarcomotoid renal cell carcinoma, chromophobe renal cell carcinoma, renal medullary carcinoma, collecting duct renal cell carcinoma, unclassified renal cell carcinoma, renal oncocytoma, angiomyolipoma, or clear cell papillary carcinoma), a liver cancer (e.g., hepatocellular carcinoma, fibrolamellar hepatocellular carcinoma, cholangiocarcinoma, mucinous cystic neoplasm, intraductal papillary biliary neoplasm, hepatoblastoma, cholangiocellular cystadenocarcinoma, angiosarcoma, hemangioendothelioma, embryonal sarcoma, fibrosarcoma, leiomyosarcoma, rhabdomyosarcoma, carcinosarcomas, teratomas, yolk sac tumours, carcinoid tumours, lymphomas, or liver metastasis), a lung cancer (e.g., non-small cell lung carcinoma, small-cell lung carcinoma, lung adenocarcinoma, lung squamous cell carcinoma, large cell carcinoma, carcinoid tumors, bronchial gland carcinoma, carcinosarcoma, pulmonary blastoma, giant or spindle cell carcinoma, or sarcomatoid carcinoma), a mesothelioma (e.g., malignant mesothelioma, or malignant pleural mesothelioma), a cystadenocarcinoma (e.g., ovarian serous cystadenocarcinoma) an adenocarcinoma (e.g., pancreatic adenocarincoma), a pheochromocytoma or paraganglioma, a prostate adenocarcinoma, a sarcoma, a skin cutaneous melanoma, a stomach adenocarcinoma, a testicular germ cell cancer, a thyroid carcinoma, a uterine cancer (e.g., uterine carcinosarcoma, or uterine corpus endometrial carcinoma), a uveal melanoma.

[0024] In some embodiments, the antibody or antigen-binding fragment thereof is administered subcutaneously, intravenously, intradermally, intraperitoneally, orally, intramuscularly or intracranially. In some embodiments, the antibody or antigen-binding fragment thereof is administered to the subject in combination with a second therapeutic agent. In some embodiments, the second therapeutic agent comprises a cancer chemotherapeutic agent, radiation therapy, a cytotoxic agent, another antibody, a NSAID, a corticosteroid, a dietary supplement such as an antioxidant, or a combination thereof. In some embodiments, the anti-cancer agent is an anti-cancer antibody or a chemotherapeutic agent. In some embodiments, the second therapeutic agent is administered prior to, concurrently, or after administering the antibody or antigen binding fragment.

[0025] Provided herein is an isolated nucleic acid molecule comprising at least one of: a nucleic acid sequence encoding a CDR-H1, wherein the nucleic acid sequence is selected from SEQ ID NOs: 2711-2981; a nucleic acid sequence encoding a CDR-H2, wherein the nucleic acid sequence is selected from SEQ ID NOs: 3253-3523; a nucleic acid sequence encoding a CDR-H3, wherein the nucleic acid sequence is selected from SEQ ID NOs: 3795-4065; a nucleic acid sequence encoding a CDR-L1, wherein the nucleic acid sequence is selected from SEQ ID NOs: 2982-3252; a nucleic acid sequence encoding a CDR-L2, wherein the nucleic acid sequence is selected from SEQ ID NOs: 3524-3794; or a nucleic acid sequence encoding a CDR-L3, wherein the nucleic acid sequence is selected from SEQ ID NOs: 4066-4336.

[0026] In some embodiments, the nucleic acid sequence is selected from any one of SEQ ID NOs: 2169-2439.

[0027] Provided herein is an isolated nucleic acid molecule comprising a nucleic acid sequence encoding a light chain polypeptide of an antibody, wherein the nucleic acid sequence is selected from any one of SEQ ID NOs: 2440-2710.

[0028] Provided herein is a vector comprising the isolated nucleic acid molecule of any one of aspects above

[0029] The vector of claim 97, wherein the isolated nucleic acid is operably linked to a regulatory control sequence.

[0030] Provided herein is a host cell comprising the vector described above or the isolated nucleic acid molecule of any one of aspects above.

[0031] Provided herein is a method of producing an antibody or an antigen binding fragment thereof, the method comprising: culturing the host cell described above in a medium under conditions permitting expression of a polypeptide encoded by the isolated nucleic acid molecule and assembling of the antibody or an antigen binding fragment thereof, and purifying the antibody or antigen binding fragment thereof from the cultured cell or the medium of the cell.

[0032] Provided herein is a kit comprising a therapeutically effective amount of at least one of the antibody or antigen binding fragment thereof of any one of aspects above. In some embodiments, the kit further comprises a therapeutically effective amount of a second therapeutic agent. In some embodiments, the second therapeutic agent is an anti-cancer agent, radiation therapy, a cytotoxic agent, a NSAID, a corticosteroid, a dietary supplement such as an antioxidant, or a combination thereof. In some embodiments, the anti-cancer agent is an anti-cancer antibody or a chemotherapeutic agent. In some embodiments, the antibody or antigen binding fragment thereof is in a lyophilized or an aqueous form. In some embodiments, the kit further comprises a reconstitution solution or a diluent.

[0033] Provided herein is an antibody or an antigen binding fragment thereof that selectively binds to R-spondin 1, transcript variant 2 (RSPO1) or a variant thereof, comprising at least one of: a variable heavy chain region, wherein the variable heavy chain region comprises a complementarity-determining region heavy chain 1 (CDR-H1) of SEQ ID NO: 543, CDR-H2 of SEQ ID NO: 1085, and CDR-H3 of SEQ ID NO: 1627; and/or a variable light chain region, wherein the variable light chain region comprises a complementarity-determining region light chain 1 (CDR-L1) of SEQ ID NO: 814, CDR-L2 of SEQ ID NO: 1356, and CDR-L3 of SEQ ID NO: 1898. In some embodiments, the variable heavy chain comprises a polypeptide consensus sequence having at least 95% sequence identity to the amino acid sequence of SEQ ID NO: 1, and the variable light chain comprises a polypeptide consensus sequence having at least 95% sequence identity to the amino acid sequence of SEQ ID NO: 272. In some embodiments, the antibody or antigen binding fragment thereof binds a human RSPO1, mouse RSPO1, rat RSPO1, bovine RSPO1, or cynomolgus monkey RSPO1. In some embodiments, the human RSPO1 comprises a sequence of SEQ ID NO: 4337.

[0034] Provided herein is an antibody that competes with an antibody or antigen binding fragment of any one of claims 107-110 for binding to RSPO1, wherein the antibody binds to human RSPO1 or mouse RSPO1.

[0035] Provided herein is an antibody or an antigen binding fragment thereof that selectively binds to zinc finger DHHC-type containing 1, transcript variant 1 (ZDHHC1) or a variant thereof, comprising at least one of: a variable heavy chain region, wherein the variable heavy chain region comprises a complementarity-determining region heavy chain 1 (CDR-H1) of SEQ ID NO: 545, CDR-H2 of SEQ ID NO: 1087, and CDR-H3 of SEQ ID NO: 1629; and/or a variable light chain region, wherein the variable light chain region comprises a complementarity-determining region light chain 1 (CDR-L1) of SEQ ID NO: 816, CDR-L2 of SEQ ID NO: 1358, and CDR-L3 of SEQ ID NO: 1900. In some embodiments, the variable heavy chain comprises a polypeptide consensus sequence having at least 95% sequence identity to the amino acid sequence of SEQ ID NO: 3, and the variable light chain comprises a polypeptide consensus sequence having at least 95% sequence identity to the amino acid sequence of SEQ ID NO: 274. In some embodiments, the antibody or antigen binding fragment thereof binds a human ZDHHC1, mouse ZDHHC1, rat ZDHHC1, bovine ZDHHC1, or cynomolgus monkey ZDHHC1. In some embodiments, the human ZDHHC1 comprises a sequence of SEQ ID NO: 4338.

[0036] Provided herein is an antibody that competes with an antibody or antigen binding fragment of any one of claims 112-115 for binding to ZDHHC1, wherein the antibody binds to human ZDHHC1 or mouse ZDHHC1.

[0037] Provided herein is an antibody or an antigen binding fragment thereof that selectively binds to retinoid X receptor alpha, transcript variant 1 (RXRA) or a variant thereof, comprising at least one of: a variable heavy chain region, wherein the variable heavy chain region comprises a complementarity-determining region heavy chain 1 (CDR-H1) of SEQ ID NO: 546, CDR-H2 of SEQ ID NO: 1088, and CDR-H3 of SEQ ID NO: 1630; and/or a variable light chain region, wherein the variable light chain region comprises a complementarity-determining region light chain 1 (CDR-L1) of SEQ ID NO: 817, CDR-L2 of SEQ ID NO: 1359, and CDR-L3 of SEQ ID NO: 1901. In some embodiments, the variable heavy chain comprises a polypeptide consensus sequence having at least 95% sequence identity to the amino acid sequence of SEQ ID NO: 4, and the variable light chain comprises a polypeptide consensus sequence having at least 95% sequence identity to the amino acid sequence of SEQ ID NO: 275. In some embodiments, the antibody or antigen binding fragment thereof binds a human RXRA, mouse RXRA, rat RXRA, bovine RXRA, or cynomolgus monkey RXRA. In some embodiments, the human RXRA comprises a sequence of SEQ ID NO: 4339.

[0038] Provided herein is an antibody that competes with an antibody or antigen binding fragment of any one of claims 117-120 for binding to RXRA, wherein the antibody binds to human RXRA or mouse RXRA.

[0039] Provided herein is an antibody or an antigen binding fragment thereof that selectively binds to retinoid X receptor gamma, transcript variant 1 (RXRG) or a variant thereof, comprising at least one of: a variable heavy chain region, wherein the variable heavy chain region comprises a complementarity-determining region heavy chain 1 (CDR-H1) of SEQ ID NO: 546, CDR-H2 of SEQ ID NO: 1088, and CDR-H3 of SEQ ID NO: 1630; and/or a variable light chain region, wherein the variable light chain region comprises a complementarity-determining region light chain 1 (CDR-L1) of SEQ ID NO: 817, CDR-L2 of SEQ ID NO: 1359, and CDR-L3 of SEQ ID NO: 1901. In some embodiments, the variable heavy chain comprises a polypeptide consensus sequence having at least 95% sequence identity to the amino acid sequence of SEQ ID NO: 4, and the variable light chain comprises a polypeptide consensus sequence having at least 95% sequence identity to the amino acid sequence of SEQ ID NO: 275. In some embodiments, the antibody or antigen binding fragment thereof binds a human RXRG, mouse RXRG, rat RXRG, bovine RXRG, or cynomolgus monkey RXRG. In some embodiments, the human RXRG comprises a sequence of SEQ ID NO: 4340.

[0040] Provided herein is an antibody that competes with an antibody or antigen binding fragment of any one of claims 122-125 for binding to RXRG, wherein the antibody binds to human RXRG or mouse RXRG.

[0041] Provided herein is an antibody or an antigen binding fragment thereof that selectively binds to transmembrane protein 154 (TMEM154) or a variant thereof, comprising at least one of: a variable heavy chain region, wherein the variable heavy chain region comprises a complementarity-determining region heavy chain 1 (CDR-H1) of SEQ ID NO: 547, CDR-H2 of SEQ ID NO: 1089, and CDR-H3 of SEQ ID NO: 1631; and/or a variable light chain region, wherein the variable light chain region comprises a complementarity-determining region light chain 1 (CDR-L1) of SEQ ID NO: 818, CDR-L2 of SEQ ID NO: 1360, and CDR-L3 of SEQ ID NO: 1902. In some embodiments, the variable heavy chain comprises a polypeptide consensus sequence having at least 95% sequence identity to the amino acid sequence of SEQ ID NO: 5, and the variable light chain comprises a polypeptide consensus sequence having at least 95% sequence identity to the amino acid sequence of SEQ ID NO: 276. In some embodiments, the antibody or antigen binding fragment thereof binds a human TMEM154, mouse TMEM154, rat TMEM154, bovine TMEM154, or cynomolgus monkey TMEM154. In some embodiments, the human TMEM154 comprises a sequence of SEQ ID NO: 4341.

[0042] Provided herein is an antibody that competes with an antibody or antigen binding fragment of any one of claims 127-130 for binding to TMEM154, wherein the antibody binds to human TMEM154 or mouse TMEM154.

[0043] Provided herein is an antibody or an antigen binding fragment thereof that selectively binds to SNAP associated protein, transcript variant 1 (SNAPIN) or a variant thereof, comprising at least one of: a variable heavy chain region, wherein the variable heavy chain region comprises a complementarity-determining region heavy chain 1 (CDR-H1) of SEQ ID NO: 548, CDR-H2 of SEQ ID NO: 1090, and CDR-H3 of SEQ ID NO: 1632; and/or a variable light chain region, wherein the variable light chain region comprises a complementarity-determining region light chain 1 (CDR-L1) of SEQ ID NO: 819, CDR-L2 of SEQ ID NO: 1361, and CDR-L3 of SEQ ID NO: 1903. In some embodiments, the variable heavy chain comprises a polypeptide consensus sequence having at least 95% sequence identity to the amino acid sequence of SEQ ID NO: 6, and the variable light chain comprises a polypeptide consensus sequence having at least 95% sequence identity to the amino acid sequence of SEQ ID NO: 277. In some embodiments, the antibody or antigen binding fragment thereof binds a human SNAPIN, mouse SNAPIN, rat SNAPIN, bovine SNAPIN, or cynomolgus monkey SNAPIN. In some embodiments, the human SNAPIN comprises a sequence of SEQ ID NO: 4342.

[0044] Provided herein is an antibody that competes with an antibody or antigen binding fragment of any one of claims 132-135 for binding to SNAPIN, wherein the antibody binds to human SNAPIN or mouse SNAPIN.

[0045] Provided herein is an antibody or an antigen binding fragment thereof that selectively binds to glycogen phosphorylase L, transcript variant 1 (PYGL) or a variant thereof, comprising at least one of: a variable heavy chain region, wherein the variable heavy chain region comprises a complementarity-determining region heavy chain 1 (CDR-H1) of SEQ ID NO: 549, CDR-H2 of SEQ ID NO: 1091, and CDR-H3 of SEQ ID NO: 1633; and/or a variable light chain region, wherein the variable light chain region comprises a complementarity-determining region light chain 1 (CDR-L1) of SEQ ID NO: 820, CDR-L2 of SEQ ID NO: 1362, and CDR-L3 of SEQ ID NO: 1904. In some embodiments, the variable heavy chain comprises a polypeptide consensus sequence having at least 95% sequence identity to the amino acid sequence of SEQ ID NO: 7, and the variable light chain comprises a polypeptide consensus sequence having at least 95% sequence identity to the amino acid sequence of SEQ ID NO: 278. In some embodiments, the antibody or antigen binding fragment thereof binds a human PYGL, mouse PYGL, rat PYGL, bovine PYGL, or cynomolgus monkey PYGL. In some embodiments, the human PYGL comprises a sequence of SEQ ID NO: 4343.

[0046] Provided herein is an antibody that competes with an antibody or antigen binding fragment of any one of claims 137-140 for binding to PYGL, wherein the antibody binds to human PYGL or mouse PYGL.

[0047] Provided herein is an antibody or an antigen binding fragment thereof that selectively binds to Reticulocalbin 3 (RCN3) or a variant thereof, comprising at least one of: a variable heavy chain region, wherein the variable heavy chain region comprises a complementarity-determining region heavy chain 1 (CDR-H1) of SEQ ID NO: 549, CDR-H2 of SEQ ID NO: 1091, and CDR-H3 of SEQ ID NO: 1633; and/or a variable light chain region, wherein the variable light chain region comprises a complementarity-determining region light chain 1 (CDR-L1) of SEQ ID NO: 820, CDR-L2 of SEQ ID NO: 1362, and CDR-L3 of SEQ ID NO: 1904. In some embodiments, the variable heavy chain comprises a polypeptide consensus sequence having at least 95% sequence identity to the amino acid sequence of SEQ ID NO: 7, and the variable light chain comprises a polypeptide consensus sequence having at least 95% sequence identity to the amino acid sequence of SEQ ID NO: 278. In some embodiments, the antibody or antigen binding fragment thereof binds a human RCN3, mouse RCN3, rat RCN3, bovine RCN3, or cynomolgus monkey RCN3. In some embodiments, the human RCN3 comprises a sequence of SEQ ID NO: 4344.

[0048] Provided herein is an antibody that competes with an antibody or antigen binding fragment of any one of claims 142-145 for binding to RCN3, wherein the antibody binds to human RCN3 or mouse RCN3.

[0049] Provided herein is an antibody or an antigen binding fragment thereof that selectively binds to synaptotagmin 12, transcript variant X4 (SYT12) or a variant thereof, comprising at least one of: a variable heavy chain region, wherein the variable heavy chain region comprises a complementarity-determining region heavy chain 1 (CDR-H1) of SEQ ID NO: 549, CDR-H2 of SEQ ID NO: 1091, and CDR-H3 of SEQ ID NO: 1633; and/or a variable light chain region, wherein the variable light chain region comprises a complementarity-determining region light chain 1 (CDR-L1) of SEQ ID NO: 820, CDR-L2 of SEQ ID NO: 1362, and CDR-L3 of SEQ ID NO: 1904. In some embodiments, the variable heavy chain comprises a polypeptide consensus sequence having at least 95% sequence identity to the amino acid sequence of SEQ ID NO: 7, and the variable light chain comprises a polypeptide consensus sequence having at least 95% sequence identity to the amino acid sequence of SEQ ID NO: 278. In some embodiments, the antibody or antigen binding fragment thereof binds a human SYT12, mouse SYT12, rat SYT12, bovine SYT12, or cynomolgus monkey SYT12. In some embodiments, the human SYT12 comprises a sequence of SEQ ID NO: 4345.

[0050] Provided herein is an antibody that competes with an antibody or antigen binding fragment of any one of claims 147-150 for binding to SYT12, wherein the antibody binds to human SYT12 or mouse SYT12.

[0051] Provided herein is an antibody or an antigen binding fragment thereof that selectively binds to Nuclear receptor subfamily 2 group f member 6 (Nr2f6) or a variant thereof, comprising at least one of:
[0052] a variable heavy chain region, wherein the variable heavy chain region comprises a complementarity-determining region heavy chain 1 (CDR-H1) of SEQ ID NO: 550, CDR-H2 of SEQ ID NO: 1092, and CDR-H3 of SEQ ID NO: 1634; and/or a variable light chain region, wherein the variable light chain region comprises a complementarity-determining region light chain 1 (CDR-L1) of SEQ ID NO: 821, CDR-L2 of SEQ ID NO: 1363, and CDR-L3 of SEQ ID NO: 1905. In some embodiments, the variable heavy chain comprises a polypeptide consensus sequence having at least 95% sequence identity to the amino acid sequence of SEQ ID NO: 8, and the variable light chain comprises a polypeptide consensus sequence having at least 95% sequence identity to the amino acid sequence of SEQ ID NO: 279. In some embodiments, the antibody or antigen binding fragment thereof binds a human Nr2f6, mouse Nr2f6, rat Nr2f6, bovine Nr2f6, or cynomolgus monkey Nr2f6. In some embodiments, the human Nr2f6 comprises a sequence of SEQ ID NO: 4346.

[0053] Provided herein is an antibody that competes with an antibody or antigen binding fragment of any one of claims 152-155 for binding to Nr2f6, wherein the antibody binds to human Nr2f6 or mouse Nr2f6.

[0054] Provided herein is an antibody or an antigen binding fragment thereof that selectively binds to protein phosphatase 1 regulatory subunit 13 like, transcript variant 2 (PPP1R13L) or a variant thereof, comprising at least one of: a variable heavy chain region, wherein the variable heavy chain region comprises a complementarity-determining region heavy chain 1 (CDR-H1) of SEQ ID NO: 550, CDR-H2 of SEQ ID NO: 1092, and CDR-H3 of SEQ ID NO: 1634; and/or a variable light chain region, wherein the variable light chain region comprises a complementarity-determining region light chain 1 (CDR-L1) of SEQ ID NO: 821, CDR-L2 of SEQ ID NO: 1363, and CDR-L3 of SEQ ID NO: 1905. In some embodiments, the variable heavy chain comprises a polypeptide consensus sequence having at least 95% sequence identity to the amino acid sequence of SEQ ID NO: 8, and the variable light chain comprises a polypeptide consensus sequence having at least 95% sequence identity to the amino acid sequence of SEQ ID NO: 279. In some embodiments, the antibody or antigen binding fragment thereof binds a human PPP1R13L, mouse PPP1R13L, rat PPP1R13L, bovine PPP1R13L, or cynomolgus monkey PPP1R13L. In some embodiments, the human PPP1R13L comprises a sequence of SEQ ID NO: 4347.

[0055] Provided herein is an antibody that competes with an antibody or antigen binding fragment of any one of claims 157-160 for binding to PPP1R13L, wherein the antibody binds to human PPP1R13L or mouse PPP1R13L.

[0056] Provided herein is an antibody or an antigen binding fragment thereof that selectively binds to olfactory receptor family 6 subfamily Q member 1 (gene/pseudogene) (OR6Q1) or a variant thereof, comprising at least one of: a variable heavy chain region, wherein the variable heavy chain region comprises a complementarity-determining region heavy chain 1 (CDR-H1) of SEQ ID NO: 552, CDR-H2 of SEQ ID NO: 1094, and CDR-H3 of SEQ ID NO: 1636; and/or a variable light chain region, wherein the variable light chain region comprises a complementarity-determining region light chain 1 (CDR-L1) of SEQ ID NO: 823, CDR-L2 of SEQ ID NO: 1365, and CDR-L3 of SEQ ID NO: 1907. In some embodiments, the variable heavy chain comprises a polypeptide consensus sequence having at least 95% sequence identity to the amino acid sequence of SEQ ID NO: 10, and the variable light chain comprises a polypeptide consensus sequence having at least 95% sequence identity to the amino acid sequence of SEQ ID NO: 281. In some embodiments, the antibody or antigen binding fragment thereof binds a human OR6Q1, mouse OR6Q1, rat OR6Q1, bovine OR6Q1, or cynomolgus monkey OR6Q1. In some embodiments, the human OR6Q1 comprises a sequence of SEQ ID NO: 4348.

[0057] Provided herein is an antibody that competes with an antibody or antigen binding fragment of any one of claims 162-165 for binding to OR6Q1, wherein the antibody binds to human OR6Q1 or mouse OR6Q1.

[0058] Provided herein is an antibody or an antigen binding fragment thereof that selectively binds to cancer/testis antigen 1A (CTAG1A) or a variant thereof, comprising at least one of: a variable heavy chain region, wherein the variable heavy chain region comprises a complementarity-determining region heavy chain 1 (CDR-H1) of SEQ ID NO: 553, CDR-H2 of SEQ ID NO: 1095, and CDR-H3 of SEQ ID NO: 1637; and/or a variable light chain region, wherein the variable light chain region comprises a complementarity-determining region light chain 1 (CDR-L1) of SEQ ID NO: 824, CDR-L2 of SEQ ID NO: 1366, and CDR-L3 of SEQ ID NO: 1908. In some embodiments, the variable heavy chain comprises a polypeptide consensus sequence having at least 95% sequence identity to the amino acid sequence of SEQ ID NO: 11, and the variable light chain comprises a polypeptide consensus sequence having at least 95% sequence identity to the amino acid sequence of SEQ ID NO: 282. In some embodiments, the antibody or antigen binding fragment thereof binds a human CTAG1A, mouse CTAG1A, rat CTAG1A, bovine CTAG1A, or cynomolgus monkey CTAG1A. In some embodiments, the human CTAG1A comprises a sequence of SEQ ID NO: 4349.

[0059] Provided herein is an antibody that competes with an antibody or antigen binding fragment of any one of claims 167-170 for binding to CTAG1A, wherein the antibody binds to human CTAG1A or mouse CTAG1A.

[0060] Provided herein is an antibody or an antigen binding fragment thereof that selectively binds to cancer/testis antigen 1A (CTAG1A) or a variant thereof, comprising at least one of: a variable heavy chain region, wherein the variable heavy chain region comprises a complementarity-determining region heavy chain 1 (CDR-H1) of SEQ ID NO: 554, CDR-H2 of SEQ ID NO: 1096, and CDR-H3 of SEQ ID NO: 1638; and/or a variable light chain region, wherein the variable light chain region comprises a complementarity-determining region light chain 1 (CDR-L1) of SEQ ID NO: 825, CDR-L2 of SEQ ID NO: 1367, and CDR-L3 of SEQ ID NO: 1909. In some embodiments, the variable heavy chain comprises a polypeptide consensus sequence having at least 95% sequence identity to the amino acid sequence of SEQ ID NO: 12, and the variable light chain comprises a polypeptide consensus sequence having at least 95% sequence identity to the amino acid sequence of SEQ ID NO: 283. In some embodiments, the antibody or antigen binding fragment thereof binds a human CTAG1A, mouse CTAG1A, rat CTAG1A, bovine CTAG1A, or cynomolgus monkey CTAG1A. In some embodiments, the human CTAG1A comprises a sequence of SEQ ID NO: 4349.

[0061] Provided herein is an antibody that competes with an antibody or antigen binding fragment of any one of claims 172-175 for binding to CTAG1A, wherein the antibody binds to human CTAG1A or mouse CTAG1A.

[0062] Provided herein is an antibody or an antigen binding fragment thereof that selectively binds to 5-hydroxytryptamine receptor 1E (HTR1E) or a variant thereof, comprising at least one of: a variable heavy chain region, wherein the variable heavy chain region comprises a complementarity-determining region heavy chain 1 (CDR-H1) of SEQ ID NO: 555, CDR-H2 of SEQ ID NO: 1097, and CDR-H3 of SEQ ID NO: 1639; and/or a variable light chain region, wherein the variable light chain region comprises a complementarity-determining region light chain 1 (CDR-L1) of SEQ ID NO: 826, CDR-L2 of SEQ ID NO: 1368, and CDR-L3 of SEQ ID NO: 1910. In some embodiments, the variable heavy chain comprises a polypeptide consensus sequence having at least 95% sequence identity to the amino acid sequence of SEQ ID NO: 13, and the variable light chain comprises a polypeptide consensus sequence having at least 95% sequence identity to the amino acid sequence of SEQ ID NO: 284. In some embodiments, the antibody or antigen binding fragment thereof binds a human HTR1E, mouse HTR1E, rat HTR1E, bovine HTR1E, or cynomolgus monkey HTR1E. In some embodiments, the human HTR1E comprises a sequence of SEQ ID NO: 4350.

[0063] Provided herein is an antibody that competes with an antibody or antigen binding fragment of any one of claims 177-180 for binding to HTR1E, wherein the antibody binds to human HTR1E or mouse HTR1E.

[0064] Provided herein is an antibody or an antigen binding fragment thereof that selectively binds to microfibril associated protein 3, transcript variant 3 (MFAP3) or a variant thereof, comprising at least one of: a variable heavy chain region, wherein the variable heavy chain region comprises a complementarity-determining region heavy chain 1 (CDR-H1) of SEQ ID NO: 557, CDR-H2 of SEQ ID NO: 1099, and CDR-H3 of SEQ ID NO: 1641; and/or a variable light chain region, wherein the variable light chain region comprises a complementarity-determining region light chain 1 (CDR-L1) of SEQ ID NO: 828, CDR-L2 of SEQ ID NO: 1370, and CDR-L3 of SEQ ID NO: 1912. In some embodiments, the variable heavy chain comprises a polypeptide consensus sequence having at least 95% sequence identity to the amino acid sequence of SEQ ID NO: 15, and the variable light chain comprises a polypeptide consensus sequence having at least 95% sequence identity to the amino acid sequence of SEQ ID NO: 286. In some embodiments, the antibody or antigen binding fragment thereof binds a human MFAP3, mouse MFAP3, rat MFAP3, bovine MFAP3, or cynomolgus monkey MFAP3. In some embodiments, the human MFAP3 comprises a sequence of SEQ ID NO: 4351.

[0065] Provided herein is an antibody that competes with an antibody or antigen binding fragment of any one of claims 182-185 for binding to MFAP3, wherein the antibody binds to human MFAP3 or mouse MFAP3.

[0066] Provided herein is an antibody or an antigen binding fragment thereof that selectively binds to hyaluronan binding protein 4 (HABP4) or a variant thereof, comprising at least one of: a variable heavy chain region, wherein the variable heavy chain region comprises a complementarity-determining region heavy chain 1 (CDR-H1) of SEQ ID NO: 559, CDR-H2 of SEQ ID NO: 1101, and CDR-H3 of SEQ ID NO: 1643; and/or
[0067] a variable light chain region, wherein the variable light chain region comprises a complementarity-determining region light chain 1 (CDR-L1) of SEQ ID NO: 830, CDR-L2 of SEQ ID NO: 1372, and CDR-L3 of SEQ ID NO: 1914. In some embodiments, the variable heavy chain comprises a polypeptide consensus sequence having at least 95% sequence identity to the amino acid sequence of SEQ ID NO: 17, and the variable light chain comprises a polypeptide consensus sequence having at least 95% sequence identity to the amino acid sequence of SEQ ID NO: 288. In some embodiments, the antibody or antigen binding fragment thereof binds a human HABP4, mouse HABP4, rat HABP4, bovine HABP4, or cynomolgus monkey HABP4. In some embodiments, the human HABP4 comprises a sequence of SEQ ID NO: 4352.

[0068] Provided herein is an antibody that competes with an antibody or antigen binding fragment of any one of claims 187-190 for binding to HABP4, wherein the antibody binds to human HABP4 or mouse HABP4.

[0069] Provided herein is an antibody or an antigen binding fragment thereof that selectively binds to glucuronidase, beta pseudogene (BC025996.2_frag) or a variant thereof, comprising at least one of: a variable heavy chain region, wherein the variable heavy chain region comprises a complementarity-determining region heavy chain 1 (CDR-H1) of SEQ ID NO: 561, CDR-H2 of SEQ ID NO: 1103, and CDR-H3 of SEQ ID NO: 1645; and/or a variable light chain region, wherein the variable light chain region comprises a complementarity-determining region light chain 1 (CDR-L1) of SEQ ID NO: 832, CDR-L2 of SEQ ID NO: 1374, and CDR-L3 of SEQ ID NO: 1916. In some embodiments, the variable heavy chain comprises a polypeptide consensus sequence having at least 95% sequence identity to the amino acid sequence of SEQ ID NO: 19, and the variable light chain comprises a polypeptide consensus sequence having at least 95% sequence identity to the amino acid sequence of SEQ ID NO: 290. In some embodiments, the antibody or antigen binding fragment thereof binds a human BC025996.2_frag, mouse BC025996.2_frag, rat BC025996.2_frag, bovine BC025996.2_frag, or cynomolgus monkey BC025996.2_frag. In some embodiments, the human BC025996.2_frag comprises a sequence of SEQ ID NO: 4353.

[0070] Provided herein is an antibody that competes with an antibody or antigen binding fragment of any one of claims 192-195 for binding to BC025996.2_frag, wherein the antibody binds to human BC025996.2_frag or mouse BC025996.2_frag.

[0071] Provided herein is an antibody or an antigen binding fragment thereof that selectively binds to dual specificity phosphatase 12 (DUSP12) or a variant thereof, comprising at least one of: a variable heavy chain region, wherein the variable heavy chain region comprises a complementarity-determining region heavy chain 1 (CDR-H1) of SEQ ID NO: 562, CDR-H2 of SEQ ID NO: 1104, and CDR-H3 of SEQ ID NO: 1646; and/or a variable light chain region, wherein the variable light chain region comprises a complementarity-determining region light chain 1 (CDR-L1) of SEQ ID NO: 833, CDR-L2 of SEQ ID NO: 1375, and CDR-L3 of SEQ ID NO: 1917. In some embodiments, the variable heavy chain comprises a polypeptide consensus sequence having at least 95% sequence identity to the amino acid sequence of SEQ ID NO: 20, and the variable light chain comprises a polypeptide consensus sequence having at least 95% sequence identity to the amino acid sequence of SEQ ID NO: 291. In some embodiments, the antibody or antigen binding fragment thereof binds a human DUSP12, mouse DUSP12, rat DUSP12, bovine DUSP12, or cynomolgus monkey DUSP12. In some embodiments, the human DUSP12 comprises a sequence of SEQ ID NO: 4354.

[0072] Provided herein is an antibody that competes with an antibody or antigen binding fragment of any one of claims 197-200 for binding to DUSP12, wherein the antibody binds to human DUSP12 or mouse DUSP12.

[0073] Provided herein is an antibody or an antigen binding fragment thereof that selectively binds to actinin alpha 1, transcript variant 2 (ACTN1) or a variant thereof, comprising at least one of: a variable heavy chain region, wherein the variable heavy chain region comprises a complementarity-determining region heavy chain 1 (CDR-H1) of SEQ ID NO: 562, CDR-H2 of SEQ ID NO: 1104, and CDR-H3 of SEQ ID NO: 1646; and/or a variable light chain region, wherein the variable light chain region comprises a complementarity-determining region light chain 1 (CDR-L1) of SEQ ID NO: 833, CDR-L2 of SEQ ID NO: 1375, and CDR-L3 of SEQ ID NO: 1917. In some embodiments, the variable heavy chain comprises a polypeptide consensus sequence having at least 95% sequence identity to the amino acid sequence of SEQ ID NO: 20, and the variable light chain comprises a polypeptide consensus sequence having at least 95% sequence identity to the amino acid sequence of SEQ ID NO: 291. In some embodiments, the antibody or antigen binding fragment thereof binds a human ACTN1, mouse ACTN1, rat ACTN1, bovine ACTN1, or cynomolgus monkey ACTN1. In some embodiments, the human ACTN1 comprises a sequence of SEQ ID NO: 4355.

[0074] Provided herein is an antibody that competes with an antibody or antigen binding fragment of any one of claims 202-205 for binding to ACTN1, wherein the antibody binds to human ACTN1 or mouse ACTN1.

[0075] Provided herein is an antibody or an antigen binding fragment thereof that selectively binds to zinc finger with KRAB and SCAN domains 4, transcript variant X1 (ZKSCAN4) or a variant thereof, comprising at least one of: a variable heavy chain region, wherein the variable heavy chain region comprises a complementarity-determining region heavy chain 1 (CDR-H1) of SEQ ID NO: 564, CDR-H2 of SEQ ID NO: 1106, and CDR-H3 of SEQ ID NO: 1648; and/or a variable light chain region, wherein the variable light chain region comprises a complementarity-determining region light chain 1 (CDR-L1) of SEQ ID NO: 835, CDR-L2 of SEQ ID NO: 1377, and CDR-L3 of SEQ ID NO: 1919. In some embodiments, the variable heavy chain comprises a polypeptide consensus sequence having at least 95% sequence identity to the amino acid sequence of SEQ ID NO: 22, and the variable light chain comprises a polypeptide consensus sequence having at least 95% sequence identity to the amino acid sequence of SEQ ID NO: 293. In some embodiments, the antibody or antigen binding fragment thereof binds a human ZKSCAN4, mouse ZKSCAN4, rat ZKSCAN4, bovine ZKSCAN4, or cynomolgus monkey ZKSCAN4. In some embodiments, the human ZKSCAN4 comprises a sequence of SEQ ID NO: 4356.

[0076] Provided herein is an antibody that competes with an antibody or antigen binding fragment of any one of claims 207-210 for binding to ZKSCAN4, wherein the antibody binds to human ZKSCAN4 or mouse ZKSCAN4.

[0077] Provided herein is an antibody or an antigen binding fragment thereof that selectively binds to PNMA family member 5, transcript variant 2 (PNMA5) or a variant thereof, comprising at least one of: a variable heavy chain region, wherein the variable heavy chain region comprises a complementarity-determining region heavy chain 1 (CDR-H1) of SEQ ID NO: 566, CDR-H2 of SEQ ID NO: 1108, and CDR-H3 of SEQ ID NO: 1650; and/or a variable light chain region, wherein the variable light chain region comprises a complementarity-determining region light chain 1 (CDR-L1) of SEQ ID NO: 837, CDR-L2 of SEQ ID NO: 1379, and CDR-L3 of SEQ ID NO: 1921. In some embodiments, the variable heavy chain comprises a polypeptide consensus sequence having at least 95% sequence identity to the amino acid sequence of SEQ ID NO: 24, and the variable light chain comprises a polypeptide consensus sequence having at least 95% sequence identity to the amino acid sequence of SEQ ID NO: 295. In some embodiments, the antibody or antigen binding fragment thereof binds a human PNMA5, mouse PNMA5, rat PNMA5, bovine PNMA5, or cynomolgus monkey PNMA5. In some embodiments, the human PNMA5 comprises a sequence of SEQ ID NO: 4357.

[0078] Provided herein is an antibody that competes with an antibody or antigen binding fragment of any one of claims 212-215 for binding to PNMA5, wherein the antibody binds to human PNMA5 or mouse PNMA5.

[0079] Provided herein is an antibody or an antigen binding fragment thereof that selectively binds to kelch like family member 40 (KLHL40) or a variant thereof, comprising at least one of: a variable heavy chain region, wherein the variable heavy chain region comprises a complementarity-determining region heavy chain 1 (CDR-H1) of SEQ ID NO: 567, CDR-H2 of SEQ ID NO: 1109, and CDR-H3 of SEQ ID NO: 1651; and/or a variable light chain region, wherein the variable light chain region comprises a complementarity-determining region light chain 1 (CDR-L1) of SEQ ID NO: 838, CDR-L2 of SEQ ID NO: 1380, and CDR-L3 of SEQ ID NO: 1922. In some embodiments, the variable heavy chain comprises a polypeptide consensus sequence having at least 95% sequence identity to the amino acid sequence of SEQ ID NO: 25, and the variable light chain comprises a polypeptide consensus sequence having at least 95% sequence identity to the amino acid sequence of SEQ ID NO: 296. In some embodiments, the antibody or antigen binding fragment thereof binds a human KLHL40, mouse KLHL40, rat KLHL40, bovine KLHL40, or cynomolgus monkey KLHL40. In some embodiments, the human KLHL40 comprises a sequence of SEQ ID NO: 4358.

[0080] Provided herein is an antibody that competes with an antibody or antigen binding fragment of any one of claims 217-220 for binding to KLHL40, wherein the antibody binds to human KLHL40 or mouse KLHL40.

[0081] Provided herein is an antibody or an antigen binding fragment thereof that selectively binds to membrane palmitoylated protein 2, transcript variant 3 (MPP2) or a variant thereof, comprising at least one of: a variable heavy chain region, wherein the variable heavy chain region comprises a complementarity-determining region heavy chain 1 (CDR-H1) of SEQ ID NO: 567, CDR-H2 of SEQ ID NO: 1109, and CDR-H3 of SEQ ID NO: 1651; and/or a variable light chain region, wherein the variable light chain region comprises a complementarity-determining region light chain 1 (CDR-L1) of SEQ ID NO: 838, CDR-L2 of SEQ ID NO: 1380, and CDR-L3 of SEQ ID NO: 1922. In some embodiments, the variable heavy chain comprises a polypeptide consensus sequence having at least 95% sequence identity to the amino acid sequence of SEQ ID NO: 25, and the variable light chain comprises a polypeptide consensus sequence having at least 95% sequence identity to the amino acid sequence of SEQ ID NO: 296. In some embodiments, the antibody or antigen binding fragment thereof binds a human MPP2, mouse MPP2, rat MPP2, bovine MPP2, or cynomolgus monkey MPP2. In some embodiments, the human MPP2 comprises a sequence of SEQ ID NO: 4359.

[0082] Provided herein is an antibody that competes with an antibody or antigen binding fragment of any one of claims 222-225 for binding to MPP2, wherein the antibody binds to human MPP2 or mouse MPP2.

[0083] Provided herein is an antibody or an antigen binding fragment thereof that selectively binds to butyrophilin subfamily 1 member A1 (BTN1A1) or a variant thereof, comprising at least one of: a variable heavy chain region, wherein the variable heavy chain region comprises a complementarity-determining region heavy chain 1 (CDR-H1) of SEQ ID NO: 568, CDR-H2 of SEQ ID NO: 1110, and CDR-H3 of SEQ ID NO: 1652; and/or a variable light chain region, wherein the variable light chain region comprises a complementarity-determining region light chain 1 (CDR-L1) of SEQ ID NO: 839, CDR-L2 of SEQ ID NO: 1381, and CDR-L3 of SEQ ID NO: 1923. In some embodiments, the variable heavy chain comprises a polypeptide consensus sequence having at least 95% sequence identity to the amino acid sequence of SEQ ID NO: 26, and the variable light chain comprises a polypeptide consensus sequence having at least 95% sequence identity to the amino acid sequence of SEQ ID NO: 297. In some embodiments, the antibody or antigen binding fragment thereof binds a human BTN1A1, mouse BTN1A1, rat BTN1A1, bovine BTN1A1, or cynomolgus monkey BTN1A1. In some embodiments, the human BTN1A1 comprises a sequence of SEQ ID NO: 4360.

[0084] Provided herein is an antibody that competes with an antibody or antigen binding fragment of any one of claims 227-230 for binding to BTN1A1, wherein the antibody binds to human BTN1A1 or mouse BTN1A1.

[0085] Provided herein is an antibody or an antigen binding fragment thereof that selectively binds to peroxisomal biogenesis factor 11 gamma, transcript variant 1 (PEX11G) or a variant thereof, comprising at least one of: a variable heavy chain region, wherein the variable heavy chain region comprises a complementarity-determining region heavy chain 1 (CDR-H1) of SEQ ID NO: 569, CDR-H2 of SEQ ID NO: 1111, and CDR-H3 of SEQ ID NO: 1653; and/or a variable light chain region, wherein the variable light chain region comprises a complementarity-determining region light chain 1 (CDR-L1) of SEQ ID NO: 840, CDR-L2 of SEQ ID NO: 1382, and CDR-L3 of SEQ ID NO: 1924. In some embodiments, the variable heavy chain comprises a polypeptide consensus sequence having at least 95% sequence identity to the amino acid sequence of SEQ ID NO: 27, and the variable light chain comprises a polypeptide consensus sequence having at least 95% sequence identity to the amino acid sequence of SEQ ID NO: 298. In some embodiments, the antibody or antigen binding fragment thereof binds a human PEX11G, mouse PEX11G, rat PEX11G, bovine PEX11G, or cynomolgus monkey PEX11G. In some embodiments, the human PEX11G comprises a sequence of SEQ ID NO: 4361.

[0086] Provided herein is an antibody that competes with an antibody or antigen binding fragment of any one of claims 232-235 for binding to PEX11G, wherein the antibody binds to human PEX11G or mouse PEX11G.

[0087] Provided herein is an antibody or an antigen binding fragment thereof that selectively binds to zinc finger protein 8 (ZNF8) or a variant thereof, comprising at least one of: a variable heavy chain region, wherein the variable heavy chain region comprises a complementarity-determining region heavy chain 1 (CDR-H1) of SEQ ID NO: 572, CDR-H2 of SEQ ID NO: 1114, and CDR-H3 of SEQ ID NO: 1656; and/or a variable light chain region, wherein the variable light chain region comprises a complementarity-determining region light chain 1 (CDR-L1) of SEQ ID NO: 843, CDR-L2 of SEQ ID NO: 1385, and CDR-L3 of SEQ ID NO: 1927. In some embodiments, the variable heavy chain comprises a polypeptide consensus sequence having at least 95% sequence identity to the amino acid sequence of SEQ ID NO: 30, and the variable light chain comprises a polypeptide consensus sequence having at least 95% sequence identity to the amino acid sequence of SEQ ID NO: 301. In some embodiments, the antibody or antigen binding fragment thereof binds a human ZNF8, mouse ZNF8, rat ZNF8, bovine ZNF8, or cynomolgus monkey ZNF8. In some embodiments, the human ZNF8 comprises a sequence of SEQ ID NO: 4362.

[0088] Provided herein is an antibody that competes with an antibody or antigen binding fragment of any one of claims 237-240 for binding to ZNF8, wherein the antibody binds to human ZNF8 or mouse ZNF8.

[0089] Provided herein is an antibody or an antigen binding fragment thereof that selectively binds to SATB homeobox 2, transcript variant 2 (SATB2) or a variant thereof, comprising at least one of: a variable heavy chain region, wherein the variable heavy chain region comprises a complementarity-determining region heavy chain 1 (CDR-H1) of SEQ ID NO: 572, CDR-H2 of SEQ ID NO: 1114, and CDR-H3 of SEQ ID NO: 1656; and/or a variable light chain region, wherein the variable light chain region comprises a complementarity-determining region light chain 1 (CDR-L1) of SEQ ID NO: 843, CDR-L2 of SEQ ID NO: 1385, and CDR-L3 of SEQ ID NO: 1927. In some embodiments, the variable heavy chain comprises a polypeptide consensus sequence having at least 95% sequence identity to the amino acid sequence of SEQ ID NO: 30, and the variable light chain comprises a polypeptide consensus sequence having at least 95% sequence identity to the amino acid sequence of SEQ ID NO: 301. In some embodiments, the antibody or antigen binding fragment thereof binds a human SATB2, mouse SATB2, rat SATB2, bovine SATB2, or cynomolgus monkey SATB2. In some embodiments, the human SATB2 comprises a sequence of SEQ ID NO: 4363.

[0090] Provided herein is an antibody that competes with an antibody or antigen binding fragment of any one of claims 242-245 for binding to SATB2, wherein the antibody binds to human SATB2 or mouse SATB2.

[0091] Provided herein is an antibody or an antigen binding fragment thereof that selectively binds to ganglioside induced differentiation associated protein 1, transcript variant 2 (GDAP1) or a variant thereof, comprising at least one of: a variable heavy chain region, wherein the variable heavy chain region comprises a complementarity-determining region heavy chain 1 (CDR-H1) of SEQ ID NO: 572, CDR-H2 of SEQ ID NO: 1114, and CDR-H3 of SEQ ID NO: 1656; and/or a variable light chain region, wherein the variable light chain region comprises a complementarity-determining region light chain 1 (CDR-L1) of SEQ ID NO: 843, CDR-L2 of SEQ ID NO: 1385, and CDR-L3 of SEQ ID NO: 1927. In some embodiments, the variable heavy chain comprises a polypeptide consensus sequence having at least 95% sequence identity to the amino acid sequence of SEQ ID NO: 30, and the variable light chain comprises a polypeptide consensus sequence having at least 95% sequence identity to the amino acid sequence of SEQ ID NO: 301. In some embodiments, the antibody or antigen binding fragment thereof binds a human GDAP1, mouse GDAP1, rat GDAP1, bovine GDAP1, or cynomolgus monkey GDAP1. In some embodiments, the human GDAP1 comprises a sequence of SEQ ID NO: 4364.

[0092] Provided herein is an antibody that competes with an antibody or antigen binding fragment of any one of claims 247-250 for binding to GDAP1, wherein the antibody binds to human GDAP1 or mouse GDAP1.

[0093] Provided herein is an antibody or an antigen binding fragment thereof that selectively binds to catenin alpha like 1, transcript variant 1 (CTNNAL1) or a variant thereof, comprising at least one of: a variable heavy chain region, wherein the variable heavy chain region comprises a complementarity-determining region heavy chain 1 (CDR-H1) of SEQ ID NO: 578, CDR-H2 of SEQ ID NO: 1120, and CDR-H3 of SEQ ID NO: 1662; and/or a variable light chain region, wherein the variable light chain region comprises a complementarity-determining region light chain 1 (CDR-L1) of SEQ ID NO: 849, CDR-L2 of SEQ ID NO: 1391, and CDR-L3 of SEQ ID NO: 1933. In some embodiments, the variable heavy chain comprises a polypeptide consensus sequence having at least 95% sequence identity to the amino acid sequence of SEQ ID NO: 36, and the variable light chain comprises a polypeptide consensus sequence having at least 95% sequence identity to the amino acid sequence of SEQ ID NO: 307. In some embodiments, the antibody or antigen binding fragment thereof binds a human CTNNAL1, mouse CTNNAL1, rat CTNNAL1, bovine CTNNAL1, or cynomolgus monkey CTNNAL1. In some embodiments, the human CTNNAL1 comprises a sequence of SEQ ID NO: 4365.

[0094] Provided herein is an antibody that competes with an antibody or antigen binding fragment of any one of claims 252-255 for binding to CTNNAL1, wherein the antibody binds to human CTNNAL1 or mouse CTNNAL1.

[0095] Provided herein is an an antibody or an antigen binding fragment thereof that selectively binds to FA complementation group G (FANCG) or a variant thereof, comprising at least one of: a variable heavy chain region, wherein the variable heavy chain region comprises a complementarity-determining region heavy chain 1 (CDR-H1) of SEQ ID NO: 579, CDR-H2 of SEQ ID NO: 1121, and CDR-H3 of SEQ ID NO: 1663; and/or a variable light chain region, wherein the variable light chain region comprises a complementarity-determining region light chain 1 (CDR-L1) of SEQ ID NO: 850, CDR-L2 of SEQ ID NO: 1392, and CDR-L3 of SEQ ID NO: 1934. In some embodiments, the variable heavy chain comprises a polypeptide consensus sequence having at least 95% sequence identity to the amino acid sequence of SEQ ID NO: 37, and the variable light chain comprises a polypeptide consensus sequence having at least 95% sequence identity to the amino acid sequence of SEQ ID NO: 308. In some embodiments, the antibody or antigen binding fragment thereof binds a human FANCG, mouse FANCG, rat FANCG, bovine FANCG, or cynomolgus monkey FANCG. In some embodiments, the human FANCG comprises a sequence of SEQ ID NO: 4366.

[0096] Provided herein is an antibody that competes with an antibody or antigen binding fragment of any one of claims 257-260 for binding to FANCG, wherein the antibody binds to human FANCG or mouse FANCG.

[0097] Provided herein is an antibody or an antigen binding fragment thereof that selectively binds to DEAD-box helicase 18 (DDX18) or a variant thereof, comprising at least one of: a variable heavy chain region, wherein the variable heavy chain region comprises a complementarity-determining region heavy chain 1 (CDR-H1) of SEQ ID NO: 582, CDR-H2 of SEQ ID NO: 1124, and CDR-H3 of SEQ ID NO: 1666; and/or a variable light chain region, wherein the variable light chain region comprises a complementarity-determining region light chain 1 (CDR-L1) of SEQ ID NO: 853, CDR-L2 of SEQ ID NO: 1395, and CDR-L3 of SEQ ID NO: 1937. In some embodiments, the variable heavy chain comprises a polypeptide consensus sequence having at least 95% sequence identity to the amino acid sequence of SEQ ID NO: 40, and the variable light chain comprises a polypeptide consensus sequence having at least 95% sequence identity to the amino acid sequence of SEQ ID NO: 311. In some embodiments, the antibody or antigen binding fragment thereof binds a human DDX18, mouse DDX18, rat DDX18, bovine DDX18, or cynomolgus monkey DDX18. In some embodiments, the human DDX18 comprises a sequence of SEQ ID NO: 4367.

[0098] Provided herein is an antibody that competes with an antibody or antigen binding fragment of any one of claims 262-265 for binding to DDX18, wherein the antibody binds to human DDX18 or mouse DDX18.

[0099] Provided herein is an antibody or an antigen binding fragment thereof that selectively binds to syntaxin 1A, transcript variant 1 (STX1A) or a variant thereof, comprising at least one of: a variable heavy chain region, wherein the variable heavy chain region comprises a complementarity-determining region heavy chain 1 (CDR-H1) of SEQ ID NO: 582, CDR-H2 of SEQ ID NO: 1124, and CDR-H3 of SEQ ID NO: 1666; and/or a variable light chain region, wherein the variable light chain region comprises a complementarity-determining region light chain 1 (CDR-L1) of SEQ ID NO: 853, CDR-L2 of SEQ ID NO: 1395, and CDR-L3 of SEQ ID NO: 1937. In some embodiments, the variable heavy chain comprises a polypeptide consensus sequence having at least 95% sequence identity to the amino acid sequence of SEQ ID NO: 40, and the variable light chain comprises a polypeptide consensus sequence having at least 95% sequence identity to the amino acid sequence of SEQ ID NO: 311. In some embodiments, the antibody or antigen binding fragment thereof binds a human STX1A, mouse STX1A, rat STX1A, bovine STX1A, or cynomolgus monkey STX1A. In some embodiments, the human STX1A comprises a sequence of SEQ ID NO: 4368.

[0100] Provided herein is an antibody that competes with an antibody or antigen binding fragment of any one of claims 267-270 for binding to STX1A, wherein the antibody binds to human STX1A or mouse STX1A.

[0101] Provided herein is an antibody or an antigen binding fragment thereof that selectively binds to geminin DNA replication inhibitor, transcript variant 1 (GMNN) or a variant thereof, comprising at least one of: a variable heavy chain region, wherein the variable heavy chain region comprises a complementarity-determining region heavy chain 1 (CDR-H1) of SEQ ID NO: 582, CDR-H2 of SEQ ID NO: 1124, and CDR-H3 of SEQ ID NO: 1666; and/or a variable light chain region, wherein the variable light chain region comprises a complementarity-determining region light chain 1 (CDR-L1) of SEQ ID NO: 853, CDR-L2 of SEQ ID NO: 1395, and CDR-L3 of SEQ ID NO: 1937. In some embodiments, the variable heavy chain comprises a polypeptide consensus sequence having at least 95% sequence identity to the amino acid sequence of SEQ ID NO: 40, and the variable light chain comprises a polypeptide consensus sequence having at least 95% sequence identity to the amino acid sequence of SEQ ID NO: 311. In some embodiments, the antibody or antigen binding fragment thereof binds a human GMNN, mouse GMNN, rat GMNN, bovine GMNN, or cynomolgus monkey GMNN. In some embodiments, the human GMNN comprises a sequence of SEQ ID NO: 4369.

[0102] Provided herein is an antibody that competes with an antibody or antigen binding fragment of any one of claims 272-275 for binding to GMNN, wherein the antibody binds to human GMNN or mouse GMNN.

[0103] Provided herein is an antibody or an antigen binding fragment thereof that selectively binds to ubiquilin 1, transcript variant 2 (UBQLN1) or a variant thereof, comprising at least one of: a variable heavy chain region, wherein the variable heavy chain region comprises a complementarity-determining region heavy chain 1 (CDR-H1) of SEQ ID NO: 585, CDR-H2 of SEQ ID NO: 1127, and CDR-H3 of SEQ ID NO: 1669; and/or a variable light chain region, wherein the variable light chain region comprises a complementarity-determining region light chain 1 (CDR-L1) of SEQ ID NO: 856, CDR-L2 of SEQ ID NO: 1398, and CDR-L3 of SEQ ID NO: 1940. In some embodiments, the variable heavy chain comprises a polypeptide consensus sequence having at least 95% sequence identity to the amino acid sequence of SEQ ID NO: 43, and the variable light chain comprises a polypeptide consensus sequence having at least 95% sequence identity to the amino acid sequence of SEQ ID NO: 314. In some embodiments, the antibody or antigen binding fragment thereof binds a human UBQLN1, mouse UBQLN1, rat UBQLN1, bovine UBQLN1, or cynomolgus monkey UBQLN1. In some embodiments, the human UBQLN1 comprises a sequence of SEQ ID NO: 4370.

[0104] Provided herein is an antibody that competes with an antibody or antigen binding fragment of any one of claims 277-280 for binding to UBQLN1, wherein the antibody binds to human UBQLN1 or mouse UBQLN1.

[0105] Provided herein is an antibody or an antigen binding fragment thereof that selectively binds to carnosine dipeptidase 2, transcript variant 1 (CNDP2) or a variant thereof, comprising at least one of: a variable heavy chain region, wherein the variable heavy chain region comprises a complementarity-determining region heavy chain 1 (CDR-H1) of SEQ ID NO: 585, CDR-H2 of SEQ ID NO: 1127, and CDR-H3 of SEQ ID NO: 1669; and/or a variable light chain region, wherein the variable light chain region comprises a complementarity-determining region light chain 1 (CDR-L1) of SEQ ID NO: 856, CDR-L2 of SEQ ID NO: 1398, and CDR-L3 of SEQ ID NO: 1940. In some embodiments, the variable heavy chain comprises a polypeptide consensus sequence having at least 95% sequence identity to the amino acid sequence of SEQ ID NO: 43, and the variable light chain comprises a polypeptide consensus sequence having at least 95% sequence identity to the amino acid sequence of SEQ ID NO: 314. In some embodiments, the antibody or antigen binding fragment thereof binds a human CNDP2, mouse CNDP2, rat CNDP2, bovine CNDP2, or cynomolgus monkey CNDP2. In some embodiments, the human CNDP2 comprises a sequence of SEQ ID NO: 4371.

[0106] Provided herein is an antibody that competes with an antibody or antigen binding fragment of any one of claims 282-285 for binding to CNDP2, wherein the antibody binds to human CNDP2 or mouse CNDP2.

[0107] Provided herein is an antibody or an antigen binding fragment thereof that selectively binds to X-linked inhibitor of apoptosis, transcript variant 2 (XIAP) or a variant thereof, comprising at least one of: a variable heavy chain region, wherein the variable heavy chain region comprises a complementarity-determining region heavy chain 1 (CDR-H1) of SEQ ID NO: 587, CDR-H2 of SEQ ID NO: 1129, and CDR-H3 of SEQ ID NO: 1671; and/or a variable light chain region, wherein the variable light chain region comprises a complementarity-determining region light chain 1 (CDR-L1) of SEQ ID NO: 858, CDR-L2 of SEQ ID NO: 1400, and CDR-L3 of SEQ ID NO: 1942. In some embodiments, the variable heavy chain comprises a polypeptide consensus sequence having at least 95% sequence identity to the amino acid sequence of SEQ ID NO: 45, and the variable light chain comprises a polypeptide consensus sequence having at least 95% sequence identity to the amino acid sequence of SEQ ID NO: 316. In some embodiments, the antibody or antigen binding fragment thereof binds a human XIAP, mouse XIAP, rat XIAP, bovine XIAP, or cynomolgus monkey XIAP. In some embodiments, the human XIAP comprises a sequence of SEQ ID NO: 4372.

[0108] Provided herein is an antibody that competes with an antibody or antigen binding fragment of any one of claims 287-290 for binding to XIAP, wherein the antibody binds to human XIAP or mouse XIAP.

[0109] Provided herein an antibody or an antigen binding fragment thereof that selectively binds to hyaluronan binding protein 4 (HABP4) or a variant thereof, comprising at least one of: a variable heavy chain region, wherein the variable heavy chain region comprises a complementarity-determining region heavy chain 1 (CDR-H1) of SEQ ID NO: 587, CDR-H2 of SEQ ID NO: 1129, and CDR-H3 of SEQ ID NO: 1671; and/or a variable light chain region, wherein the variable light chain region comprises a complementarity-determining region light chain 1 (CDR-L1) of SEQ ID NO: 858, CDR-L2 of SEQ ID NO: 1400, and CDR-L3 of SEQ ID NO: 1942. In some embodiments, the variable heavy chain comprises a polypeptide consensus sequence having at least 95% sequence identity to the amino acid sequence of SEQ ID NO: 45, and the variable light chain comprises a polypeptide consensus sequence having at least 95% sequence identity to the amino acid sequence of SEQ ID NO: 316. In some embodiments, the antibody or antigen binding fragment thereof binds a human HABP4, mouse HABP4, rat HABP4, bovine HABP4, or cynomolgus monkey HABP4. In some embodiments, the human HABP4 comprises a sequence of SEQ ID NO: 4352.

[0110] Provided herein is an antibody that competes with an antibody or antigen binding fragment of any one of claims 292-295 for binding to HABP4, wherein the antibody binds to human HABP4 or mouse HABP4.

[0111] Provided herein is an antibody or an antigen binding fragment thereof that selectively binds to endosome associated trafficking regulator 1, transcript variant 2 (SDCCAG3) or a variant thereof, comprising at least one of: a variable heavy chain region, wherein the variable heavy chain region comprises a complementarity-determining region heavy chain 1 (CDR-H1) of SEQ ID NO: 589, CDR-H2 of SEQ ID NO: 1131, and CDR-H3 of SEQ ID NO: 1673; and/or a variable light chain region, wherein the variable light chain region comprises a complementarity-determining region light chain 1 (CDR-L1) of SEQ ID NO: 860, CDR-L2 of SEQ ID NO: 1402, and CDR-L3 of SEQ ID NO: 1944. In some embodiments, the variable heavy chain comprises a polypeptide consensus sequence having at least 95% sequence identity to the amino acid sequence of SEQ ID NO: 47, and the variable light chain comprises a polypeptide consensus sequence having at least 95% sequence identity to the amino acid sequence of SEQ ID NO: 318. In some embodiments, the antibody or antigen binding fragment thereof binds a human SDCCAG3, mouse SDCCAG3, rat SDCCAG3, bovine SDCCAG3, or cynomolgus monkey SDCCAG3. In some embodiments, the human SDCCAG3 comprises a sequence of SEQ ID NO: 4373.

[0112] Provided herein is an antibody that competes with an antibody or antigen binding fragment of any one of claims 297-300 for binding to SDCCAG3, wherein the antibody binds to human SDCCAG3 or mouse SDCCAG3.

[0113] Provided herein is an antibody or an antigen binding fragment thereof that selectively binds to charged multivesicular body protein 4B (CHMP4B) or a variant thereof, comprising at least one of: a variable heavy chain region, wherein the variable heavy chain region comprises a complementarity-determining region heavy chain 1 (CDR-H1) of SEQ ID NO: 589, CDR-H2 of SEQ ID NO: 1131, and CDR-H3 of SEQ ID NO: 1673; and/or a variable light chain region, wherein the variable light chain region comprises a complementarity-determining region light chain 1 (CDR-L1) of SEQ ID NO: 860, CDR-L2 of SEQ ID NO: 1402, and CDR-L3 of SEQ ID NO: 1944. In some embodiments, the variable heavy chain comprises a polypeptide consensus sequence having at least 95% sequence identity to the amino acid sequence of SEQ ID NO: 47, and the variable light chain comprises a polypeptide consensus sequence having at least 95% sequence identity to the amino acid sequence of SEQ ID NO: 318. In some embodiments, the antibody or antigen binding fragment thereof binds a human CHMP4B, mouse CHMP4B, rat CHMP4B, bovine CHMP4B, or cynomolgus monkey CHMP4B. In some embodiments, the human CHMP4B comprises a sequence of SEQ ID NO: 4374.

[0114] Provided herein is an antibody that competes with an antibody or antigen binding fragment of any one of claims 302-305 for binding to CHMP4B, wherein the antibody binds to human CHMP4B or mouse CHMP4B.

[0115] Provided herein is an antibody or an antigen binding fragment thereof that selectively binds to glycogenin 2, transcript variant 2 (GYG2) or a variant thereof, comprising at least one of: a variable heavy chain region, wherein the variable heavy chain region comprises a complementarity-determining region heavy chain 1 (CDR-H1) of SEQ ID NO: 590, CDR-H2 of SEQ ID NO: 1132, and CDR-H3 of SEQ ID NO: 1674; and/or a variable light chain region, wherein the variable light chain region comprises a complementarity-determining region light chain 1 (CDR-L1) of SEQ ID NO: 861, CDR-L2 of SEQ ID NO: 1403, and CDR-L3 of SEQ ID NO: 1945. In some embodiments, the variable heavy chain comprises a polypeptide consensus sequence having at least 95% sequence identity to the amino acid sequence of SEQ ID NO: 48, and the variable light chain comprises a polypeptide consensus sequence having at least 95% sequence identity to the amino acid sequence of SEQ ID NO: 319. In some embodiments, the antibody or antigen binding fragment thereof binds a human GYG2, mouse GYG2, rat GYG2, bovine GYG2, or cynomolgus monkey GYG2. In some embodiments, the human GYG2 comprises a sequence of SEQ ID NO: 4375.

[0116] Provided herein is an antibody that competes with an antibody or antigen binding fragment of any one of claims 307-310 for binding to GYG2, wherein the antibody binds to human GYG2 or mouse GYG2.

[0117] Provided herein is an antibody or an antigen binding fragment thereof that selectively binds to Egf like and emi domain containing 1, pseudogene (EGFEM1P) or a variant thereof, comprising at least one of: a variable heavy chain region, wherein the variable heavy chain region comprises a complementarity-determining region heavy chain 1 (CDR-H1) of SEQ ID NO: 591, CDR-H2 of SEQ ID NO: 1133, and CDR-H3 of SEQ ID NO: 1675; and/or a variable light chain region, wherein the variable light chain region comprises a complementarity-determining region light chain 1 (CDR-L1) of SEQ ID NO: 862, CDR-L2 of SEQ ID NO: 1404, and CDR-L3 of SEQ ID NO: 1946. In some embodiments, the variable heavy chain comprises a polypeptide consensus sequence having at least 95% sequence identity to the amino acid sequence of SEQ ID NO: 49, and the variable light chain comprises a polypeptide consensus sequence having at least 95% sequence identity to the amino acid sequence of SEQ ID NO: 320. In some embodiments, the antibody or antigen binding fragment thereof binds a human EGFEM1P, mouse EGFEM1P, rat EGFEM1P, bovine EGFEM1P, or cynomolgus monkey EGFEM1P. In some embodiments, the human EGFEM1P comprises a sequence of SEQ ID NO: 4376.

[0118] Provided herein is an antibody that competes with an antibody or antigen binding fragment of any one of claims 312-315 for binding to EGFEM1P, wherein the antibody binds to human EGFEM1P or mouse EGFEM1P.

[0119] Provided herein is an antibody or an antigen binding fragment thereof that selectively binds to actinin alpha 4, transcript variant 1 (ACTN4) or a variant thereof, comprising at least one of: a variable heavy chain region, wherein the variable heavy chain region comprises a complementarity-determining region heavy chain 1 (CDR-H1) of SEQ ID NO: 593, CDR-H2 of SEQ ID NO: 1135, and CDR-H3 of SEQ ID NO: 1677; and/or a variable light chain region, wherein the variable light chain region comprises a complementarity-determining region light chain 1 (CDR-L1) of SEQ ID NO: 864, CDR-L2 of SEQ ID NO: 1406, and CDR-L3 of SEQ ID NO: 1948. In some embodiments, the variable heavy chain comprises a polypeptide consensus sequence having at least 95% sequence identity to the amino acid sequence of SEQ ID NO: 51, and the variable light chain comprises a polypeptide consensus sequence having at least 95% sequence identity to the amino acid sequence of SEQ ID NO: 322. In some embodiments, the antibody or antigen binding fragment thereof binds a human ACTN4, mouse ACTN4, rat ACTN4, bovine ACTN4, or cynomolgus monkey ACTN4. In some embodiments, the human ACTN4 comprises a sequence of SEQ ID NO: 4377.

[0120] Provided herein is an antibody that competes with an antibody or antigen binding fragment of any one of claims 317-320 for binding to ACTN4, wherein the antibody binds to human ACTN4 or mouse ACTN4.

[0121] Provided herein is an antibody or an antigen binding fragment thereof that selectively binds to PNMA family member 5, transcript variant 2 (PNMA5) or a variant thereof, comprising at least one of: a variable heavy chain region, wherein the variable heavy chain region comprises a complementarity-determining region heavy chain 1 (CDR-H1) of SEQ ID NO: 594, CDR-H2 of SEQ ID NO: 1136, and CDR-H3 of SEQ ID NO: 1678; and/or a variable light chain region, wherein the variable light chain region comprises a complementarity-determining region light chain 1 (CDR-L1) of SEQ ID NO: 865, CDR-L2 of SEQ ID NO: 1407, and CDR-L3 of SEQ ID NO: 1949. In some embodiments, the variable heavy chain comprises a polypeptide consensus sequence having at least 95% sequence identity to the amino acid sequence of SEQ ID NO: 52, and the variable light chain comprises a polypeptide consensus sequence having at least 95% sequence identity to the amino acid sequence of SEQ ID NO: 323. In some embodiments, the antibody or antigen binding fragment thereof binds a human PNMA5, mouse PNMA5, rat PNMA5, bovine PNMA5, or cynomolgus monkey PNMA5. In some embodiments, the human PNMA5 comprises a sequence of SEQ ID NO: 4357.

[0122] Provided herein is an antibody that competes with an antibody or antigen binding fragment of any one of claims 322-325 for binding to PNMA5, wherein the antibody binds to human PNMA5 or mouse PNMA5.

[0123] Provided herein is an antibody or an antigen binding fragment thereof that selectively binds to phospholipase C delta 1, transcript variant 2 (PLCD1) or a variant thereof, comprising at least one of: a variable heavy chain region, wherein the variable heavy chain region comprises a complementarity-determining region heavy chain 1 (CDR-H1) of SEQ ID NO: 594, CDR-H2 of SEQ ID NO: 1136, and CDR-H3 of SEQ ID NO: 1678; and/or a variable light chain region, wherein the variable light chain region comprises a complementarity-determining region light chain 1 (CDR-L1) of SEQ ID NO: 865, CDR-L2 of SEQ ID NO: 1407, and CDR-L3 of SEQ ID NO: 1949. In some embodiments, the variable heavy chain comprises a polypeptide consensus sequence having at least 95% sequence identity to the amino acid sequence of SEQ ID NO: 52; and the variable light chain comprises a polypeptide consensus sequence having at least 95% sequence identity to the amino acid sequence of SEQ ID NO: 323. In some embodiments, the antibody or antigen binding fragment thereof binds a human PLCD1, mouse PLCD1, rat PLCD1, bovine PLCD1, or cynomolgus monkey PLCD1. In some embodiments, the human PLCD1 comprises a sequence of SEQ ID NO: 4378.

[0124] Provided herein is an antibody that competes with an antibody or antigen binding fragment of any one of claims 327-330 for binding to PLCD1, wherein the antibody binds to human PLCD1 or mouse PLCD1.

[0125] Provided herein is an antibody or an antigen binding fragment thereof that selectively binds to zinc finger protein 326, transcript variant 1 (ZNF326) or a variant thereof, comprising at least one of: a variable heavy chain region, wherein the variable heavy chain region comprises a complementarity-determining region heavy chain 1 (CDR-H1) of SEQ ID NO: 594, CDR-H2 of SEQ ID NO: 1136, and CDR-H3 of SEQ ID NO: 1678; and/or a variable light chain region, wherein the variable light chain region comprises a complementarity-determining region light chain 1 (CDR-L1) of SEQ ID NO: 865, CDR-L2 of SEQ ID NO: 1407, and CDR-L3 of SEQ ID NO: 1949. In some embodiments, the variable heavy chain comprises a polypeptide consensus sequence having at least 95% sequence identity to the amino acid sequence of SEQ ID NO: 52, and the variable light chain comprises a polypeptide consensus sequence having at least 95% sequence identity to the amino acid sequence of SEQ ID NO: 323. In some embodiments, the antibody or antigen binding fragment thereof binds a human ZNF326, mouse ZNF326, rat ZNF326, bovine ZNF326, or cynomolgus monkey ZNF326. In some embodiments, the human ZNF326 comprises a sequence of SEQ ID NO: 4379.

[0126] Provided herein is an antibody that competes with an antibody or antigen binding fragment of any one of claims 332-335 for binding to ZNF326, wherein the antibody binds to human ZNF326 or mouse ZNF326.

[0127] Provided herein is an antibody or an antigen binding fragment thereof that selectively binds to—(LN608403.1_frag) or a variant thereof, comprising at least one of: a variable heavy chain region, wherein the variable heavy chain region comprises a complementarity-determining region heavy chain 1 (CDR-H1) of SEQ ID NO: 600, CDR-H2 of SEQ ID NO: 1142, and CDR-H3 of SEQ ID NO: 1684; and/or a variable light chain region, wherein the variable light chain region comprises a complementarity-determining region light chain 1 (CDR-L1) of SEQ ID NO: 871, CDR-L2 of SEQ ID NO: 1413, and CDR-L3 of SEQ ID NO: 1955. In some embodiments, the variable heavy chain comprises a polypeptide consensus sequence having at least 95% sequence identity to the amino acid sequence of SEQ ID NO: 58, and the variable light chain comprises a polypeptide consensus sequence having at least 95% sequence identity to the amino acid sequence of SEQ ID NO: 329. In some embodiments, the antibody or antigen binding fragment thereof binds a human LN608403.1_frag, mouse LN608403.1_frag, rat LN608403.1_frag, bovine LN608403.1_frag, or cynomolgus monkey LN608403.1_frag. In some embodiments, the human LN608403.1_frag comprises a sequence of SEQ ID NO: 4380.

[0128] Provided herein is an antibody that competes with an antibody or antigen binding fragment of any one of claims 337-340 for binding to LN608403.1_frag, wherein the antibody binds to human LN608403.1_frag or mouse LN608403.1_frag.

[0129] Provided herein is an antibody or an antigen binding fragment thereof that selectively binds to JPX transcript, XIST activator (JPX_frag) or a variant thereof, comprising at least one of: a variable heavy chain region, wherein the variable heavy chain region comprises a complementarity-determining region heavy chain 1 (CDR-H1) of SEQ ID NO: 600, CDR-H2 of SEQ ID NO: 1142, and CDR-H3 of SEQ ID NO: 1684; and/or a variable light chain region, wherein the variable light chain region comprises a complementarity-determining region light chain 1 (CDR-L1) of SEQ ID NO: 871, CDR-L2 of SEQ ID NO: 1413, and CDR-L3 of SEQ ID NO: 1955. In some embodiments, the variable heavy chain comprises a polypeptide consensus sequence having at least 95% sequence identity to the amino acid sequence of SEQ ID NO: 58, and the variable light chain comprises a polypeptide consensus sequence having at least 95% sequence identity to the amino acid sequence of SEQ ID NO: 329. In some embodiments, the antibody or antigen binding fragment thereof binds a human JPX_frag, mouse JPX_frag, rat JPX_frag, bovine JPX_frag, or cynomolgus monkey JPX_frag. In some embodiments, the human JPX_frag comprises a sequence of SEQ ID NO: 4381.

[0130] Provided herein is an antibody that competes with an antibody or antigen binding fragment of any one of claims 342-345 for binding to JPX_frag, wherein the antibody binds to human JPX_frag or mouse JPX_frag.

[0131] Provided herein is an antibody or an antigen binding fragment thereof that selectively binds to odorant binding protein 2A, transcript variant alpha (OBP2A) or a variant thereof, comprising at least one of: a variable heavy chain region, wherein the variable heavy chain region comprises a complementarity-determining region heavy chain 1 (CDR-H1) of SEQ ID NO: 600, CDR-H2 of SEQ ID NO: 1142, and CDR-H3 of SEQ ID NO: 1684; and/or a variable light chain region, wherein the variable light chain region comprises a complementarity-determining region light chain 1 (CDR-L1) of SEQ ID NO: 871, CDR-L2 of SEQ ID NO: 1413, and CDR-L3 of SEQ ID NO: 1955. In some embodiments, the variable heavy chain comprises a polypeptide consensus sequence having at least 95% sequence identity to the amino acid sequence of SEQ ID NO: 58, and the variable light chain comprises a polypeptide consensus sequence having at least 95% sequence identity to the amino acid sequence of SEQ ID NO: 329. In some embodiments, the antibody or antigen binding fragment thereof binds a human OBP2A, mouse OBP2A, rat OBP2A, bovine OBP2A, or cynomolgus monkey OBP2A. In some embodiments, the human OBP2A comprises a sequence of SEQ ID NO: 4382.

[0132] Provided herein is an antibody that competes with an antibody or antigen binding fragment of any one of claims 347-350 for binding to OBP2A, wherein the antibody binds to human OBP2A or mouse OBP2A.

[0133] Provided herein is an antibody or an antigen binding fragment thereof that selectively binds to myelin transcription factor 1 like, transcript variant 2 (MYT1L) or a variant thereof, comprising at least one of: a variable heavy chain region, wherein the variable heavy chain region comprises a complementarity-determining region heavy chain 1 (CDR-H1) of SEQ ID NO: 604, CDR-H2 of SEQ ID NO: 1146, and CDR-H3 of SEQ ID NO: 1688; and/or a variable light chain region, wherein the variable light chain region comprises a complementarity-determining region light chain 1 (CDR-L1) of SEQ ID NO: 875, CDR-L2 of SEQ ID NO: 1417, and CDR-L3 of SEQ ID NO: 1959. In some embodiments, the variable heavy chain comprises a polypeptide consensus sequence having at least 95% sequence identity to the amino acid sequence of SEQ ID NO: 62, and the variable light chain comprises a polypeptide consensus sequence having at least 95% sequence identity to the amino acid sequence of SEQ ID NO: 333. In some embodiments, the antibody or antigen binding fragment thereof binds a human MYT1L, mouse MYT1L, rat MYT1L, bovine MYT1L, or cynomolgus monkey MYT1L. In some embodiments, the human MYT1L comprises a sequence of SEQ ID NO: 4383.

[0134] Provided herein is an antibody that competes with an antibody or antigen binding fragment of any one of claims 352-355 for binding to MYT1L, wherein the antibody binds to human MYT1L or mouse MYT1L.

[0135] Provided herein is an antibody or an antigen binding fragment thereof that selectively binds to heat shock protein family E (Hsp10) member 1 (HSPE1) or a variant thereof, comprising at least one of: a variable heavy chain region, wherein the variable heavy chain region comprises a complementarity-determining region heavy chain 1 (CDR-H1) of SEQ ID NO: 604, CDR-H2 of SEQ ID NO: 1146, and CDR-H3 of SEQ ID NO: 1688; and/or a variable light chain region, wherein the variable light chain region comprises a complementarity-determining region light chain 1 (CDR-L1) of SEQ ID NO: 875, CDR-L2 of SEQ ID NO: 1417, and CDR-L3 of SEQ ID NO: 1959. In some embodiments, the variable heavy chain comprises a polypeptide consensus sequence having at least 95% sequence identity to the amino acid sequence of SEQ ID NO: 62, and the variable light chain comprises a polypeptide consensus sequence having at least 95% sequence identity to the amino acid sequence of SEQ ID NO: 333. In some embodiments, the antibody or antigen binding fragment thereof binds a human HSPE1, mouse HSPE1, rat HSPE1, bovine HSPE1, or cynomolgus monkey HSPE1. In some embodiments, the human HSPE1 comprises a sequence of SEQ ID NO: 4384.

[0136] Provided herein is an antibody that competes with an antibody or antigen binding fragment of any one of claims 357-360 for binding to HSPE1, wherein the antibody binds to human HSPE1 or mouse HSPE1.

[0137] Provided herein is an antibody or an antigen binding fragment thereof that selectively binds to kelch like ECH associated protein 1, transcript variant 1 (KEAP1) or a variant thereof, comprising at least one of: a variable heavy chain region, wherein the variable heavy chain region comprises a complementarity-determining region heavy chain 1 (CDR-H1) of SEQ ID NO: 607, CDR-H2 of SEQ ID NO: 1149, and CDR-H3 of SEQ ID NO: 1691; and/or a variable light chain region, wherein the variable light chain region comprises a complementarity-determining region light chain 1 (CDR-L1) of SEQ ID NO: 878, CDR-L2 of SEQ ID NO: 1420, and CDR-L3 of SEQ ID NO: 1962. In some embodiments, the variable heavy chain comprises a polypeptide consensus sequence having at least 95% sequence identity to the amino acid sequence of SEQ ID NO: 65, and the variable light chain comprises a polypeptide consensus sequence having at least 95% sequence identity to the amino acid sequence of SEQ ID NO: 336. In some embodiments, the antibody or antigen binding fragment thereof binds a human KEAP1, mouse KEAP1, rat KEAP1, bovine KEAP1, or cynomolgus monkey KEAP1. In some embodiments, the human KEAP1 comprises a sequence of SEQ ID NO: 4385.

[0138] Provided herein is an antibody that competes with an antibody or antigen binding fragment of any one of claims 362-365 for binding to KEAP1, wherein the antibody binds to human KEAP1 or mouse KEAP1.

[0139] Provided herein is an antibody or an antigen binding fragment thereof that selectively binds to nucleosome assembly protein 1 like 1, transcript variant 1 (NAP1L1) or a variant thereof, comprising at least one of: a variable heavy chain region, wherein the variable heavy chain region comprises a complementarity-determining region heavy chain 1 (CDR-H1) of SEQ ID NO: 614, CDR-H2 of SEQ ID NO: 1156, and CDR-H3 of SEQ ID NO: 1698; and/or a variable light chain region, wherein the variable light chain region comprises a complementarity-determining region light chain 1 (CDR-L1) of SEQ ID NO: 885, CDR-L2 of SEQ ID NO: 1427, and CDR-L3 of SEQ ID NO: 1969. In some embodiments, the variable heavy chain comprises a polypeptide consensus sequence having at least 95% sequence identity to the amino acid sequence of SEQ ID NO: 72, and the variable light chain comprises a polypeptide consensus sequence having at least 95% sequence identity to the amino acid sequence of SEQ ID NO: 343. In some embodiments, the antibody or antigen binding fragment thereof binds a human NAP1L1, mouse NAP1L1, rat NAP1L1, bovine NAP1L1, or cynomolgus monkey NAP1L1. In some embodiments, the human NAP1L1 comprises a sequence of SEQ ID NO: 4386.

[0140] Provided herein is an antibody that competes with an antibody or antigen binding fragment of any one of claims 367-370 for binding to NAP1L1, wherein the antibody binds to human NAP1L1 or mouse NAP1L1.

[0141] Provided herein is an antibody or an antigen binding fragment thereof that selectively binds to nudE neurodevelopment protein 1, transcript variant 1 (NDE1) or a variant thereof, comprising at least one of: a variable heavy chain region, wherein the variable heavy chain region comprises a complementarity-determining region heavy chain 1 (CDR-H1) of SEQ ID NO: 615, CDR-H2 of SEQ ID NO: 1157, and CDR-H3 of SEQ ID NO: 1699; and/or a variable light chain region, wherein the variable light chain region comprises a complementarity-determining region light chain 1 (CDR-L1) of SEQ ID NO: 886, CDR-L2 of SEQ ID NO: 1428, and CDR-L3 of SEQ ID NO: 1970. In some embodiments, the variable heavy chain comprises a polypeptide consensus sequence having at least 95% sequence identity to the amino acid sequence of SEQ ID NO: 73, and the variable light chain comprises a polypeptide consensus sequence having at least 95% sequence identity to the amino acid sequence of SEQ ID NO: 344. In some embodiments, the antibody or antigen binding fragment thereof binds a human NDE1, mouse NDE1, rat NDE1, bovine NDE1, or cynomolgus monkey NDE1. In some embodiments, the human NDE1 comprises a sequence of SEQ ID NO: 4387.

[0142] Provided herein is an antibody that competes with an antibody or antigen binding fragment of any one of claims 372-375 for binding to NDE1, wherein the antibody binds to human NDE1 or mouse NDE1.

[0143] Provided herein is an antibody or an antigen binding fragment thereof that selectively binds to TruB pseudouridine synthase family member 1 (TRUB1) or a variant thereof, comprising at least one of: a variable heavy chain region, wherein the variable heavy chain region comprises a complementarity-determining region heavy chain 1 (CDR-H1) of SEQ ID NO: 616, CDR-H2 of SEQ ID NO: 1158, and CDR-H3 of SEQ ID NO: 1700; and/or a variable light chain region, wherein the variable light chain region comprises a complementarity-determining region light chain 1 (CDR-L1) of SEQ ID NO: 887, CDR-L2 of SEQ ID NO: 1429, and CDR-L3 of SEQ ID NO: 1971. In some embodiments, the variable heavy chain comprises a polypeptide consensus sequence having at least 95% sequence identity to the amino acid sequence of SEQ ID NO: 74, and the variable light chain comprises a polypeptide consensus sequence having at least 95% sequence identity to the amino acid sequence of SEQ ID NO: 345. In some embodiments, the antibody or antigen binding fragment thereof binds a human TRUB1, mouse TRUB1, rat TRUB1, bovine TRUB1, or cynomolgus monkey TRUB1. In some embodiments, the human TRUB1 comprises a sequence of SEQ ID NO: 4388.

[0144] Provided herein is an antibody that competes with an antibody or antigen binding fragment of any one of claims 377-380 for binding to TRUB1, wherein the antibody binds to human TRUB1 or mouse TRUB1.

[0145] Provided herein is an antibody or an antigen binding fragment thereof that selectively binds to inosine monophosphate dehydrogenase 2 (IMPDH2) or a variant thereof, comprising at least one of: a variable heavy chain region, wherein the variable heavy chain region comprises a complementarity-determining region heavy chain 1 (CDR-H1) of SEQ ID NO: 616, CDR-H2 of SEQ ID NO: 1158, and CDR-H3 of SEQ ID NO: 1700; and/or a variable light chain region, wherein the variable light chain region comprises a complementarity-determining region light chain 1 (CDR-L1) of SEQ ID NO: 887, CDR-L2 of SEQ ID NO: 1429, and CDR-L3 of SEQ ID NO: 1971. In some embodiments, the variable heavy chain comprises a polypeptide consensus sequence having at least 95% sequence identity to the amino acid sequence of SEQ ID NO: 74; and the variable light chain comprises a polypeptide consensus sequence having at least 95% sequence identity to the amino acid sequence of SEQ ID NO: 345. In some embodiments, the antibody or antigen binding fragment thereof binds a human IMPDH2, mouse IMPDH2, rat IMPDH2, bovine IMPDH2, or cynomolgus monkey IMPDH2. In some embodiments, the human IMPDH2 comprises a sequence of SEQ ID NO: 4389.

[0146] Provided herein is an antibody that competes with an antibody or antigen binding fragment of any one of claims 382-385 for binding to IMPDH2, wherein the antibody binds to human IMPDH2 or mouse IMPDH2.

[0147] Provided herein is an antibody or an antigen binding fragment thereof that selectively binds to phospholipid scramblase 4, transcript variant X4 (PLSCR4) or a variant thereof, comprising at least one of: a variable heavy chain region, wherein the variable heavy chain region comprises a complementarity-determining region heavy chain 1 (CDR-H1) of SEQ ID NO: 616, CDR-H2 of SEQ ID NO: 1158, and CDR-H3 of SEQ ID NO: 1700; and/or a variable light chain region, wherein the variable light chain region comprises a complementarity-determining region light chain 1 (CDR-L1) of SEQ ID NO: 887, CDR-L2 of SEQ ID NO: 1429, and CDR-L3 of SEQ ID NO: 1971. In some embodiments, the variable heavy chain comprises a polypeptide consensus sequence having at least 95% sequence identity to the amino acid sequence of SEQ ID NO: 74, and the variable light chain comprises a polypeptide consensus sequence having at least 95% sequence identity to the amino acid sequence of SEQ ID NO: 345. In some embodiments, the antibody or antigen binding fragment thereof binds a human PLSCR4, mouse PLSCR4, rat PLSCR4, bovine PLSCR4, or cynomolgus monkey PLSCR4. In some embodiments, the human PLSCR4 comprises a sequence of SEQ ID NO: 4390.

[0148] Provided herein is an antibody that competes with an antibody or antigen binding fragment of any one of claims 387-390 for binding to PLSCR4, wherein the antibody binds to human PLSCR4 or mouse PLSCR4.

[0149] Provided herein is an antibody or an antigen binding fragment thereof that selectively binds to influenza virus NS1A binding protein (IVNS1ABP) or a variant thereof, comprising at least one of: a variable heavy chain region, wherein the variable heavy chain region comprises a complementarity-determining region heavy chain 1 (CDR-H1) of SEQ ID NO: 617, CDR-H2 of SEQ ID NO: 1159, and CDR-H3 of SEQ ID NO: 1701; and/or
[0150] a variable light chain region, wherein the variable light chain region comprises a complementarity-determining region light chain 1 (CDR-L1) of SEQ ID NO: 888, CDR-L2 of SEQ ID NO: 1430, and CDR-L3 of SEQ ID NO: 1972. In some embodiments, the variable heavy chain comprises a polypeptide consensus sequence having at least 95% sequence identity to the amino acid sequence of SEQ ID NO: 75, and the variable light chain comprises a polypeptide consensus sequence having at least 95% sequence identity to the amino acid sequence of SEQ ID NO: 346. In some embodiments, the antibody or antigen binding fragment thereof binds a human IVNS1ABP, mouse IVNS1ABP, rat IVNS1ABP, bovine IVNS1ABP, or cynomolgus monkey IVNS1ABP. In some embodiments, the human IVNS1ABP comprises a sequence of SEQ ID NO: 4391.

[0151] Provided herein is an antibody that competes with an antibody or antigen binding fragment of any one of claims 392-395 for binding to IVNS1ABP, wherein the antibody binds to human IVNS1ABP or mouse IVNS1ABP.

[0152] Provided herein is an antibody or an antigen binding fragment thereof that selectively binds to dishevelled segment polarity protein 3 (DVL3) or a variant thereof, comprising at least one of: a variable heavy chain region, wherein the variable heavy chain region comprises a complementarity-determining region heavy chain 1 (CDR-H1) of SEQ ID NO: 618, CDR-H2 of SEQ ID NO: 1160, and CDR-H3 of SEQ ID NO: 1702; and/or a variable light chain region, wherein the variable light chain region comprises a complementarity-determining region light chain 1 (CDR-L1) of SEQ ID NO: 889, CDR-L2 of SEQ ID NO: 1431, and CDR-L3 of SEQ ID NO: 1973. In some embodiments, the variable heavy chain comprises a polypeptide consensus sequence having at least 95% sequence identity to the amino acid sequence of SEQ ID NO: 76, and the variable light chain comprises a polypeptide consensus sequence having at least 95% sequence identity to the amino acid sequence of SEQ ID NO: 347. In some embodiments, the antibody or antigen binding fragment thereof binds a human DVL3, mouse DVL3, rat DVL3, bovine DVL3, or cynomolgus monkey DVL3. In some embodiments, the human DVL3 comprises a sequence of SEQ ID NO: 4392.

[0153] Provided herein is an antibody that competes with an antibody or antigen binding fragment of any one of claims 397-400 for binding to DVL3, wherein the antibody binds to human DVL3 or mouse DVL3.

[0154] Provided herein is an antibody or an antigen binding fragment thereof that selectively binds to Zinc finger protein 260 (ZNF260) or a variant thereof, comprising at least one of: a variable heavy chain region, wherein the variable heavy chain region comprises a complementarity-determining region heavy chain 1 (CDR-H1) of SEQ ID NO: 618, CDR-H2 of SEQ ID NO: 1160, and CDR-H3 of SEQ ID NO: 1702; and/or a variable light chain region, wherein the variable light chain region comprises a complementarity-determining region light chain 1 (CDR-L1) of SEQ ID NO: 889, CDR-L2 of SEQ ID NO: 1431, and CDR-L3 of SEQ ID NO: 1973. In some embodiments, the variable heavy chain comprises a polypeptide consensus sequence having at least 95% sequence identity to the amino acid sequence of SEQ ID NO: 76, and the variable light chain comprises a polypeptide consensus sequence having at least 95% sequence identity to the amino acid sequence of SEQ ID NO: 347. In some embodiments, the antibody or antigen binding fragment thereof binds a human ZNF260, mouse ZNF260, rat ZNF260, bovine ZNF260, or cynomolgus monkey ZNF260. In some embodiments, the human ZNF260 comprises a sequence of SEQ ID NO: 4393.

[0155] Provided herein is an antibody that competes with an antibody or antigen binding fragment of any one of claims 402-405 for binding to ZNF260, wherein the antibody binds to human ZNF260 or mouse ZNF260.

[0156] Provided herein is an antibody or an antigen binding fragment thereof that selectively binds to sorting nexin 33, transcript variant 1 (SNX33) or a variant thereof, comprising at least one of: a variable heavy chain region, wherein the variable heavy chain region comprises a complementarity-determining region heavy chain 1 (CDR-H1) of SEQ ID NO: 619, CDR-H2 of SEQ ID NO: 1161, and CDR-H3 of SEQ ID NO: 1703; and/or a variable light chain region, wherein the variable light chain region comprises a complementarity-determining region light chain 1 (CDR-L1) of SEQ ID NO: 890, CDR-L2 of SEQ ID NO: 1432, and CDR-L3 of SEQ ID NO: 1974. In some embodiments, the variable heavy chain comprises a polypeptide consensus sequence having at least 95% sequence identity to the amino acid sequence of SEQ ID NO: 77, and the variable light chain comprises a polypeptide consensus sequence having at least 95% sequence identity to the amino acid sequence of SEQ ID NO: 348. In some embodiments, the antibody or antigen binding fragment thereof binds a human SNX33, mouse SNX33, rat SNX33, bovine SNX33, or cynomolgus monkey SNX33. In some embodiments, the human SNX33 comprises a sequence of SEQ ID NO: 4394.

[0157] Provided herein is an antibody that competes with an antibody or antigen binding fragment of any one of claims 407-410 for binding to SNX33, wherein the antibody binds to human SNX33 or mouse SNX33.

[0158] Provided herein is an antibody or an antigen binding fragment thereof that selectively binds to Jupiter microtubule associated homolog 2 (HN1L) or a variant thereof, comprising at least one of: a variable heavy chain region, wherein the variable heavy chain region comprises a complementarity-determining region heavy chain 1 (CDR-H1) of SEQ ID NO: 620, CDR-H2 of SEQ ID NO: 1162, and CDR-H3 of SEQ ID NO: 1704; and/or a variable light chain region, wherein the variable light chain region comprises a complementarity-determining region light chain 1 (CDR-L1) of SEQ ID NO: 891, CDR-L2 of SEQ ID NO: 1433, and CDR-L3 of SEQ ID NO: 1975. In some embodiments, the variable heavy chain comprises a polypeptide consensus sequence having at least 95% sequence identity to the amino acid sequence of SEQ ID NO: 78, and the variable light chain comprises a polypeptide consensus sequence having at least 95% sequence identity to the amino acid sequence of SEQ ID NO: 349. In some embodiments, the antibody or antigen binding fragment thereof binds a human HN1L, mouse HN1L, rat HN1L, bovine HN1L, or cynomolgus monkey HN1L. In some embodiments, the human HN1L comprises a sequence of SEQ ID NO: 4395.

[0159] Provided herein is an antibody that competes with an antibody or antigen binding fragment of any one of claims 412-415 for binding to HN1L, wherein the antibody binds to human HN1L or mouse HN1L.

[0160] Provided herein is an antibody or an antigen binding fragment thereof that selectively binds to thioesterase superfamily member 6, transcript variant 1 (THEM6) or a variant thereof, comprising at least one of:
[0161] a variable heavy chain region, wherein the variable heavy chain region comprises a complementarity-determining region heavy chain 1 (CDR-H1) of SEQ ID NO: 620, CDR-H2 of SEQ ID NO: 1162, and CDR-H3 of SEQ ID NO: 1704; and/or a variable light chain region, wherein the variable light chain region comprises a complementarity-determining region light chain 1 (CDR-L1) of SEQ ID NO: 891, CDR-L2 of SEQ ID NO: 1433, and CDR-L3 of SEQ ID NO: 1975. In some embodiments, the variable heavy chain comprises a polypeptide consensus sequence having at least 95% sequence identity to the amino acid sequence of SEQ ID NO: 78, and the variable light chain comprises a polypeptide consensus sequence having at least 95% sequence identity to the amino acid sequence of SEQ ID NO: 349. In some embodiments, the antibody or antigen binding fragment thereof binds a human THEM6, mouse THEM6, rat THEM6, bovine THEM6, or cynomolgus monkey THEM6. In some embodiments, the human THEM6 comprises a sequence of SEQ ID NO: 4396.

[0162] Provided herein is an antibody that competes with an antibody or antigen binding fragment of any one of claims 417-420 for binding to THEM6, wherein the antibody binds to human THEM6 or mouse THEM6.

[0163] Provided herein is an antibody or an antigen binding fragment thereof that selectively binds to KH RNA binding domain containing, signal transduction associated 2, transcript variant 2 (KHDRBS2) or a variant thereof, comprising at least one of: a variable heavy chain region, wherein the variable heavy chain region comprises a complementarity-determining region heavy chain 1 (CDR-H1) of SEQ ID NO: 621, CDR-H2 of SEQ ID NO: 1163, and CDR-H3 of SEQ ID NO: 1705; and/or a variable light chain region, wherein the variable light chain region comprises a complementarity-determining region light chain 1 (CDR-L1) of SEQ ID NO: 892, CDR-L2 of SEQ ID NO: 1434, and CDR-L3 of SEQ ID NO: 1976. In some embodiments, the variable heavy chain comprises a polypeptide consensus sequence having at least 95% sequence identity to the amino acid sequence of SEQ ID NO: 79, and the variable light chain comprises a polypeptide consensus sequence having at least 95% sequence identity to the amino acid sequence of SEQ ID NO: 350. In some embodiments, the antibody or antigen binding fragment thereof binds a human KHDRBS2, mouse KHDRBS2, rat KHDRBS2, bovine KHDRBS2, or cynomolgus monkey KHDRBS2. In some embodiments, the human KHDRBS2 comprises a sequence of SEQ ID NO: 4397.

[0164] Provided herein is an antibody that competes with an antibody or antigen binding fragment of any one of claims 422-425 for binding to KHDRBS2, wherein the antibody binds to human KHDRBS2 or mouse KHDRBS2.

[0165] Provided herein is an antibody or an antigen binding fragment thereof that selectively binds to complement C1q like 3 (C1QL3) or a variant thereof, comprising at least one of: a variable heavy chain region, wherein the variable heavy chain region comprises a complementarity-determining region heavy chain 1 (CDR-H1) of SEQ ID NO: 622, CDR-H2 of SEQ ID NO: 1164, and CDR-H3 of SEQ ID NO: 1706; and/or a variable light chain region, wherein the variable light chain region comprises a complementarity-determining region light chain 1 (CDR-L1) of SEQ ID NO: 893, CDR-L2 of SEQ ID NO: 1435, and CDR-L3 of SEQ ID NO: 1977. In some embodiments, the variable heavy chain comprises a polypeptide consensus sequence having at least 95% sequence identity to the amino acid sequence of SEQ ID NO: 80, and the variable light chain comprises a polypeptide consensus sequence having at least 95% sequence identity to the amino acid sequence of SEQ ID NO: 351. In some embodiments, the antibody or antigen binding fragment thereof binds a human C1QL3, mouse C1QL3, rat C1QL3, bovine C1QL3, or cynomolgus monkey C1QL3. In some embodiments, the human C1QL3 comprises a sequence of SEQ ID NO: 4398.

[0166] Provided herein is an antibody that competes with an antibody or antigen binding fragment of any one of claims 427-430 for binding to C1QL3, wherein the antibody binds to human C1QL3 or mouse C1QL3.

[0167] Provided herein is an antibody or an antigen binding fragment thereof that selectively binds to protein phosphatase 1 regulatory subunit 27 (PPP1R27) or a variant thereof, comprising at least one of: a variable heavy chain region, wherein the variable heavy chain region comprises a complementarity-determining region heavy chain 1 (CDR-H1) of SEQ ID NO: 623, CDR-H2 of SEQ ID NO: 1165, and CDR-H3 of SEQ ID NO: 1707; and/or a variable light chain region, wherein the variable light chain region comprises a complementarity-determining region light chain 1 (CDR-L1) of SEQ ID NO: 894, CDR-L2 of SEQ ID NO: 1436, and CDR-L3 of SEQ ID NO: 1978. In some embodiments, the variable heavy chain comprises a polypeptide consensus sequence having at least 95% sequence identity to the amino acid sequence of SEQ ID NO: 81, and the variable light chain comprises a polypeptide consensus sequence having at least 95% sequence identity to the amino acid sequence of SEQ ID NO: 352. In some embodiments, the antibody or antigen binding fragment thereof binds a human PPP1R27, mouse PPP1R27, rat PPP1R27, bovine PPP1R27, or cynomolgus monkey PPP1R27. In some embodiments, the human PPP1R27 comprises a sequence of SEQ ID NO: 4399.

[0168] Provided herein is an antibody that competes with an antibody or antigen binding fragment of any one of claims 432-435 for binding to PPP1R27, wherein the antibody binds to human PPP1R27 or mouse PPP1R27.

[0169] Provided herein is an antibody or an antigen binding fragment thereof that selectively binds to deoxyribonuclease 1 like 2, transcript variant 1 (DNASE1L2) or a variant thereof, comprising at least one of: a variable heavy chain region, wherein the variable heavy chain region comprises a complementarity-determining region heavy chain 1 (CDR-H1) of SEQ ID NO: 624, CDR-H2 of SEQ ID NO: 1166, and CDR-H3 of SEQ ID NO: 1708; and/or a variable light chain region, wherein the variable light chain region comprises a complementarity-determining region light chain 1 (CDR-L1) of SEQ ID NO: 895, CDR-L2 of SEQ ID NO: 1437, and CDR-L3 of SEQ ID NO: 1979. In some embodiments, the variable heavy chain comprises a polypeptide consensus sequence having at least 95% sequence identity to the amino acid sequence of SEQ ID NO: 82, and the variable light chain comprises a polypeptide consensus sequence having at least 95% sequence identity to the amino acid sequence of SEQ ID NO: 353. In some embodiments, the antibody or antigen binding fragment thereof binds a human DNASE1L2, mouse DNASE1L2, rat DNASE1L2, bovine DNASE1L2, or cynomolgus monkey DNASE1L2. In some embodiments, the human DNASE1L2 comprises a sequence of SEQ ID NO: 4400.

[0170] Provided herein is an antibody that competes with an antibody or antigen binding fragment of any one of claims 437-440 for binding to DNASE1L2, wherein the antibody binds to human DNASE1L2 or mouse DNASE1L2.

[0171] Provided herein is an antibody or an antigen binding fragment thereof that selectively binds to extended synaptotagmin 2 (ESYT2_frag) or a variant thereof, comprising at least one of: a variable heavy chain region, wherein the variable heavy chain region comprises a complementarity-determining region heavy chain 1 (CDR-H1) of SEQ ID NO: 625, CDR-H2 of SEQ ID NO: 1167, and CDR-H3 of SEQ ID NO: 1709; and/or a variable light chain region, wherein the variable light chain region comprises a complementarity-determining region light chain 1 (CDR-L1) of SEQ ID NO: 896, CDR-L2 of SEQ ID NO: 1438, and CDR-L3 of SEQ ID NO: 1980. In some embodiments, the variable heavy chain comprises a polypeptide consensus sequence having at least 95% sequence identity to the amino acid sequence of SEQ ID NO: 83, and the variable light chain comprises a polypeptide consensus sequence having at least 95% sequence identity to the amino acid sequence of SEQ ID NO: 354. In some embodiments, the antibody or antigen binding fragment thereof binds a human ESYT2_frag, mouse ESYT2_frag, rat ESYT2_frag, bovine ESYT2_frag, or cynomolgus monkey ESYT2_frag. In some embodiments, the human ESYT2_frag comprises a sequence of SEQ ID NO: 4401.

[0172] Provided herein is an antibody that competes with an antibody or antigen binding fragment of any one of claims 442-445 for binding to ESYT2_frag, wherein the antibody binds to human ESYT2_frag or mouse ESYT2_frag.

[0173] Provided herein is an antibody or an antigen binding fragment thereof that selectively binds to C—C motif chemokine ligand 18 (CCL18) or a variant thereof, comprising at least one of: a variable heavy chain region, wherein the variable heavy chain region comprises a complementarity-determining region heavy chain 1 (CDR-H1) of SEQ ID NO: 626, CDR-H2 of SEQ ID NO: 1168, and CDR-H3 of SEQ ID NO: 1710; and/or a variable light chain region, wherein the variable light chain region comprises a complementarity-determining region light chain 1 (CDR-L1) of SEQ ID NO: 897, CDR-L2 of SEQ ID NO: 1439, and CDR-L3 of SEQ ID NO: 1981. In some embodiments, the variable heavy chain comprises a polypeptide consensus sequence having at least 95% sequence identity to the amino acid sequence of SEQ ID NO: 84, and the variable light chain comprises a polypeptide consensus sequence having at least 95% sequence identity to the amino acid sequence of SEQ ID NO: 355. In some embodiments, the antibody or antigen binding fragment thereof binds a human CCL18, mouse CCL18, rat CCL18, bovine CCL18, or cynomolgus monkey CCL18. In some embodiments, the human CCL18 comprises a sequence of SEQ ID NO: 4402.

[0174] Provided herein is an antibody that competes with an antibody or antigen binding fragment of any one of claims 447-450 for binding to CCL18, wherein the antibody binds to human CCL18 or mouse CCL18.

[0175] Provided herein is an antibody or an antigen binding fragment thereof that selectively binds to homeobox and leucine zipper encoding (HOMEZ) or a variant thereof, comprising at least one of: a variable heavy chain region, wherein the variable heavy chain region comprises a complementarity-determining region heavy chain 1 (CDR-H1) of SEQ ID NO: 627, CDR-H2 of SEQ ID NO: 1169, and CDR-H3 of SEQ ID NO: 1711; and/or a variable light chain region, wherein the variable light chain region comprises a complementarity-determining region light chain 1 (CDR-L1) of SEQ ID NO: 898, CDR-L2 of SEQ ID NO: 1440, and CDR-L3 of SEQ ID NO: 1982. In some embodiments, the variable heavy chain comprises a polypeptide consensus sequence having at least 95% sequence identity to the amino acid sequence of SEQ ID NO: 85, and the variable light chain comprises a polypeptide consensus sequence having at least 95% sequence identity to the amino acid sequence of SEQ ID NO: 356. In some embodiments, the antibody or antigen binding fragment thereof binds a human HOMEZ, mouse HOMEZ, rat HOMEZ, bovine HOMEZ, or cynomolgus monkey HOMEZ. In some embodiments, the human HOMEZ comprises a sequence of SEQ ID NO: 4403.

[0176] Provided herein is an antibody that competes with an antibody or antigen binding fragment of any one of claims 452-455 for binding to HOMEZ, wherein the antibody binds to human HOMEZ or mouse HOMEZ.

[0177] Provided herein is an antibody or an antigen binding fragment thereof that selectively binds to BAR/IMD domain containing adaptor protein 2, transcript variant 3 (BAIAP2) or a variant thereof, comprising at least one of: a variable heavy chain region, wherein the variable heavy chain region comprises a complementarity-determining region heavy chain 1 (CDR-H1) of SEQ ID NO: 627, CDR-H2 of SEQ ID NO: 1169, and CDR-H3 of SEQ ID NO: 1711; and/or a variable light chain region, wherein the variable light chain region comprises a complementarity-determining region light chain 1 (CDR-L1) of SEQ ID NO: 898, CDR-L2 of SEQ ID NO: 1440, and CDR-L3 of SEQ ID NO: 1982. In some embodiments, the variable heavy chain comprises a polypeptide consensus sequence having at least 95% sequence identity to the amino acid sequence of SEQ ID NO: 85, and the variable light chain comprises a polypeptide consensus sequence having at least 95% sequence identity to the amino acid sequence of SEQ ID NO: 356. In some embodiments, the antibody or antigen binding fragment thereof binds a human BAIAP2, mouse BAIAP2, rat BAIAP2, bovine BAIAP2, or cynomolgus monkey BAIAP2. In some embodiments, the human BAIAP2 comprises a sequence of SEQ ID NO: 4404.

[0178] Provided herein is an antibody that competes with an antibody or antigen binding fragment of any one of claims 457-460 for binding to BAIAP2, wherein the antibody binds to human BAIAP2 or mouse BAIAP2.

[0179] Provided herein is an antibody or an antigen binding fragment thereof that selectively binds to kelch like ECH associated protein 1, transcript variant 1 (KEAP1) or a variant thereof, comprising at least one of: a variable heavy chain region, wherein the variable heavy chain region comprises a complementarity-determining region heavy chain 1 (CDR-H1) of SEQ ID NO: 628, CDR-H2 of SEQ ID NO: 1170, and CDR-H3 of SEQ ID NO: 1712; and/or a variable light chain region, wherein the variable light chain region comprises a complementarity-determining region light chain 1 (CDR-L1) of SEQ ID NO: 899, CDR-L2 of SEQ ID NO: 1441, and CDR-L3 of SEQ ID NO: 1983. In some embodiments, the variable heavy chain comprises a polypeptide consensus sequence having at least 95% sequence identity to the amino acid sequence of SEQ ID NO: 86, and the variable light chain comprises a polypeptide consensus sequence having at least 95% sequence identity to the amino acid sequence of SEQ ID NO: 357. In some embodiments, the antibody or antigen binding fragment thereof binds a human KEAP1, mouse KEAP1, rat KEAP1, bovine KEAP1, or cynomolgus monkey KEAP1. In some embodiments, the human KEAP1 comprises a sequence of SEQ ID NO: 4385.

[0180] Provided herein is an antibody that competes with an antibody or antigen binding fragment of any one of claims 462-465 for binding to KEAP1, wherein the antibody binds to human KEAP1 or mouse KEAP1.

[0181] Provided herein is an antibody or an antigen binding fragment thereof that selectively binds to RUN and FYVE domain containing 3, transcript variant 2 (RUFY3) or a variant thereof, comprising at least one of: a variable heavy chain region, wherein the variable heavy chain region comprises a complementarity-determining region heavy chain 1 (CDR-H1) of SEQ ID NO: 629, CDR-H2 of SEQ ID NO: 1171, and CDR-H3 of SEQ ID NO: 1713; and/or a variable light chain region, wherein the variable light chain region comprises a complementarity-determining region light chain 1 (CDR-L1) of SEQ ID NO: 900, CDR-L2 of SEQ ID NO: 1442, and CDR-L3 of SEQ ID NO: 1984. In some embodiments, the variable heavy chain comprises a polypeptide consensus sequence having at least 95% sequence identity to the amino acid sequence of SEQ ID NO: 87, and the variable light chain comprises a polypeptide consensus sequence having at least 95% sequence identity to the amino acid sequence of SEQ ID NO: 358. In some embodiments, the antibody or antigen binding fragment thereof binds a human RUFY3, mouse RUFY3, rat RUFY3, bovine RUFY3, or cynomolgus monkey RUFY3. In some embodiments, the human RUFY3 comprises a sequence of SEQ ID NO: 4405.

[0182] Provided herein is an antibody that competes with an antibody or antigen binding fragment of any one of claims 467-470 for binding to RUFY3, wherein the antibody binds to human RUFY3 or mouse RUFY3.

[0183] Provided herein is an antibody or an antigen binding fragment thereof that selectively binds to LIM homeobox 5 (LHX5) or a variant thereof, comprising at least one of: a variable heavy chain region, wherein the variable heavy chain region comprises a complementarity-determining region heavy chain 1 (CDR-H1) of SEQ ID NO: 630, CDR-H2 of SEQ ID NO: 1172, and CDR-H3 of SEQ ID NO: 1714; and/or a variable light chain region, wherein the variable light chain region comprises a complementarity-determining region light chain 1 (CDR-L1) of SEQ ID NO: 901, CDR-L2 of SEQ ID NO: 1443, and CDR-L3 of SEQ ID NO: 1985. In some embodiments, the variable heavy chain comprises a polypeptide consensus sequence having at least 95% sequence identity to the amino acid sequence of SEQ ID NO: 88, and the variable light chain comprises a polypeptide consensus sequence having at least 95% sequence identity to the amino acid sequence of SEQ ID NO: 359. In some embodiments, the antibody or antigen binding fragment thereof binds a human LHX5, mouse LHX5, rat LHX5, bovine LHX5, or cynomolgus monkey LHX5. In some embodiments, the human LHX5 comprises a sequence of SEQ ID NO: 4406.

[0184] Provided herein is an antibody that competes with an antibody or antigen binding fragment of any one of claims 472-475 for binding to LHX5, wherein the antibody binds to human LHX5 or mouse LHX5.

[0185] Provided herein is an antibody or an antigen binding fragment thereof that selectively binds to growth factor receptor bound protein 2, transcript variant 1 (GRB2) or a variant thereof, comprising at least one of: a variable heavy chain region, wherein the variable heavy chain region comprises a complementarity-determining region heavy chain 1 (CDR-H1) of SEQ ID NO: 630, CDR-H2 of SEQ ID NO: 1172, and CDR-H3 of SEQ ID NO: 1714; and/or a variable light chain region, wherein the variable light chain region comprises a complementarity-determining region light chain 1 (CDR-L1) of SEQ ID NO: 901, CDR-L2 of SEQ ID NO: 1443, and CDR-L3 of SEQ ID NO: 1985. In some embodiments, the variable heavy chain comprises a polypeptide consensus sequence having at least 95% sequence identity to the amino acid sequence of SEQ ID NO: 88, and the variable light chain comprises a polypeptide consensus sequence having at least 95% sequence identity to the amino acid sequence of SEQ ID NO: 359. In some embodiments, the antibody or antigen binding fragment thereof binds a human GRB2, mouse GRB2, rat GRB2, bovine GRB2, or cynomolgus monkey GRB2. In some embodiments, the human GRB2 comprises a sequence of SEQ ID NO: 4407.

[0186] Provided herein is an antibody that competes with an antibody or antigen binding fragment of any one of claims 477-480 for binding to GRB2, wherein the antibody binds to human GRB2 or mouse GRB2.

[0187] Provided herein is an antibody or an antigen binding fragment thereof that selectively binds to Tyrosine hydroxylase (TH) or a variant thereof, comprising at least one of: a variable heavy chain region, wherein the variable heavy chain region comprises a complementarity-determining region heavy chain 1 (CDR-H1) of SEQ ID NO: 631, CDR-H2 of SEQ ID NO: 1173, and CDR-H3 of SEQ ID NO: 1715; and/or a variable light chain region, wherein the variable light chain region comprises a complementarity-determining region light chain 1 (CDR-L1) of SEQ ID NO: 902, CDR-L2 of SEQ ID NO: 1444, and CDR-L3 of SEQ ID NO: 1986. In some embodiments, the variable heavy chain comprises a polypeptide consensus sequence having at least 95% sequence identity to the amino acid sequence of SEQ ID NO: 89, and the variable light chain comprises a polypeptide consensus sequence having at least 95% sequence identity to the amino acid sequence of SEQ ID NO: 360. In some embodiments, the antibody or antigen binding fragment thereof binds a human TH, mouse TH, rat TH, bovine TH, or cynomolgus monkey TH. In some embodiments, the human TH comprises a sequence of SEQ ID NO: 4408.

[0188] Provided herein is an antibody that competes with an antibody or antigen binding fragment of any one of claims 482-485 for binding to TH, wherein the antibody binds to human TH or mouse TH.

[0189] Provided herein is an antibody or an antigen binding fragment thereof that selectively binds to leucine rich repeat containing 28, transcript variant 1 (LRRC28) or a variant thereof, comprising at least one of: a variable heavy chain region, wherein the variable heavy chain region comprises a complementarity-determining region heavy chain 1 (CDR-H1) of SEQ ID NO: 633, CDR-H2 of SEQ ID NO: 1175, and CDR-H3 of SEQ ID NO: 1717; and/or a variable light chain region, wherein the variable light chain region comprises a complementarity-determining region light chain 1 (CDR-L1) of SEQ ID NO: 904, CDR-L2 of SEQ ID NO: 1446, and CDR-L3 of SEQ ID NO: 1988. In some embodiments, the variable heavy chain comprises a polypeptide consensus sequence having at least 95% sequence identity to the amino acid sequence of SEQ ID NO: 91, and the variable light chain comprises a polypeptide consensus sequence having at least 95% sequence identity to the amino acid sequence of SEQ ID NO: 362. In some embodiments, the antibody or antigen binding fragment thereof binds a human LRRC28, mouse LRRC28, rat LRRC28, bovine LRRC28, or cynomolgus monkey LRRC28. In some embodiments, the human LRRC28 comprises a sequence of SEQ ID NO: 4409.

[0190] Provided herein is an antibody that competes with an antibody or antigen binding fragment of any one of claims 487-490 for binding to LRRC28, wherein the antibody binds to human LRRC28 or mouse LRRC28.

[0191] Provided herein is an antibody or an antigen binding fragment thereof that selectively binds to spermatogenesis associated 33, transcript variant 2 (SPATA33) or a variant thereof, comprising at least one of: a variable heavy chain region, wherein the variable heavy chain region comprises a complementarity-determining region heavy chain 1 (CDR-H1) of SEQ ID NO: 635, CDR-H2 of SEQ ID NO: 1177, and CDR-H3 of SEQ ID NO: 1719; and/or a variable light chain region, wherein the variable light chain region comprises a complementarity-determining region light chain 1 (CDR-L1) of SEQ ID NO: 906, CDR-L2 of SEQ ID NO: 1448, and CDR-L3 of SEQ ID NO: 1990. In some embodiments, the variable heavy chain comprises a polypeptide consensus sequence having at least 95% sequence identity to the amino acid sequence of SEQ ID NO: 93, and the variable light chain comprises a polypeptide consensus sequence having at least 95% sequence identity to the amino acid sequence of SEQ ID NO: 364. In some embodiments, the antibody or antigen binding fragment thereof binds a human SPATA33, mouse SPATA33, rat SPATA33, bovine SPATA33, or cynomolgus monkey SPATA33. In some embodiments, the human SPATA33 comprises a sequence of SEQ ID NO: 4410.

[0192] Provided herein is an antibody that competes with an antibody or antigen binding fragment of any one of claims 492-495 for binding to SPATA33, wherein the antibody binds to human SPATA33 or mouse SPATA33.

[0193] Provided herein is an antibody or an antigen binding fragment thereof that selectively binds to Atpase secretory pathway ca2+ transporting 1 (ATP2C1) or a variant thereof, comprising at least one of: a variable heavy chain region, wherein the variable heavy chain region comprises a complementarity-determining region heavy chain 1 (CDR-H1) of SEQ ID NO: 636, CDR-H2 of SEQ ID NO: 1178, and CDR-H3 of SEQ ID NO: 1720; and/or a variable light chain region, wherein the variable light chain region comprises a complementarity-determining region light chain 1 (CDR-L1) of SEQ ID NO: 907, CDR-L2 of SEQ ID NO: 1449, and CDR-L3 of SEQ ID NO: 1991. In some embodiments, the variable heavy chain comprises a polypeptide consensus sequence having at least 95% sequence identity to the amino acid sequence of SEQ ID NO: 94, and the variable light chain comprises a polypeptide consensus sequence having at least 95% sequence identity to the amino acid sequence of SEQ ID NO: 365. In some embodiments, the antibody or antigen binding fragment thereof binds a human ATP2C1, mouse ATP2C1, rat ATP2C1, bovine ATP2C1, or cynomolgus monkey ATP2C1. In some embodiments, the human ATP2C1 comprises a sequence of SEQ ID NO: 4411.

[0194] Provided herein is an antibody that competes with an antibody or antigen binding fragment of any one of claims 497-500 for binding to ATP2C1, wherein the antibody binds to human ATP2C1 or mouse ATP2C1.

[0195] Provided herein is an antibody or an antigen binding fragment thereof that selectively binds to teashirt zinc finger homeobox 2, transcript variant 1 (TSHZ2) or a variant thereof, comprising at least one of: a variable heavy chain region, wherein the variable heavy chain region comprises a complementarity-determining region heavy chain 1 (CDR-H1) of SEQ ID NO: 636, CDR-H2 of SEQ ID NO: 1178, and CDR-H3 of SEQ ID NO: 1720; and/or a variable light chain region, wherein the variable light chain region comprises a complementarity-determining region light chain 1 (CDR-L1) of SEQ ID NO: 907, CDR-L2 of SEQ ID NO: 1449, and CDR-L3 of SEQ ID NO: 1991. In some embodiments, the variable heavy chain comprises a polypeptide consensus sequence having at least 95% sequence identity to the amino acid sequence of SEQ ID NO: 94, and the variable light chain comprises a polypeptide consensus sequence having at least 95% sequence identity to the amino acid sequence of SEQ ID NO: 365. In some embodiments, the antibody or antigen binding fragment thereof binds a human TSHZ2, mouse TSHZ2, rat TSHZ2, bovine TSHZ2, or cynomolgus monkey TSHZ2. In some embodiments, the human TSHZ2 comprises a sequence of SEQ ID NO: 4412.

[0196] Provided herein is an antibody that competes with an antibody or antigen binding fragment of any one of claims 502-505 for binding to TSHZ2, wherein the antibody binds to human TSHZ2 or mouse TSHZ2.

[0197] Provided herein is an antibody or an antigen binding fragment thereof that selectively binds to Complement component 4 binding protein beta (C4BPB) or a variant thereof, comprising at least one of: a variable heavy chain region, wherein the variable heavy chain region comprises a complementarity-determining region heavy chain 1 (CDR-H1) of SEQ ID NO: 639, CDR-H2 of SEQ ID NO: 1181, and CDR-H3 of SEQ ID NO: 1723; and/or a variable light chain region, wherein the variable light chain region comprises a complementarity-determining region light chain 1 (CDR-L1) of SEQ ID NO: 910, CDR-L2 of SEQ ID NO: 1452, and CDR-L3 of SEQ ID NO: 1994. In some embodiments, the variable heavy chain comprises a polypeptide consensus sequence having at least 95% sequence identity to the amino acid sequence of SEQ ID NO: 97, and the variable light chain comprises a polypeptide consensus sequence having at least 95% sequence identity to the amino acid sequence of SEQ ID NO: 368. In some embodiments, the antibody or antigen binding fragment thereof binds a human C4BPB, mouse C4BPB, rat C4BPB, bovine C4BPB, or cynomolgus monkey C4BPB. In some embodiments, the human C4BPB comprises a sequence of SEQ ID NO: 4413.

[0198] Provided herein is an antibody that competes with an antibody or antigen binding fragment of any one of claims 507-510 for binding to C4BPB, wherein the antibody binds to human C4BPB or mouse C4BPB.

[0199] Provided herein is an antibody or an antigen binding fragment thereof that selectively binds to NCCRP1, F-box associated domain containing (NCCRP1) or a variant thereof, comprising at least one of: a variable heavy chain region, wherein the variable heavy chain region comprises a complementarity-determining region heavy chain 1 (CDR-H1) of SEQ ID NO: 640, CDR-H2 of SEQ ID NO: 1182, and CDR-H3 of SEQ ID NO: 1724; and/or a variable light chain region, wherein the variable light chain region comprises a complementarity-determining region light chain 1 (CDR-L1) of SEQ ID NO: 911, CDR-L2 of SEQ ID NO: 1453, and CDR-L3 of SEQ ID NO: 1995. In some embodiments, the variable heavy chain comprises a polypeptide consensus sequence having at least 95% sequence identity to the amino acid sequence of SEQ ID NO: 98, and the variable light chain comprises a polypeptide consensus sequence having at least 95% sequence identity to the amino acid sequence of SEQ ID NO: 369. In some embodiments, the antibody or antigen binding fragment thereof binds a human NCCRP1, mouse NCCRP1, rat NCCRP1, bovine NCCRP1, or cynomolgus monkey NCCRP1. In some embodiments, the human NCCRP1 comprises a sequence of SEQ ID NO: 4414.

[0200] Provided herein is an antibody that competes with an antibody or antigen binding fragment of any one of claims 512-515 for binding to NCCRP1, wherein the antibody binds to human NCCRP1 or mouse NCCRP1.

[0201] Provided herein is an antibody or an antigen binding fragment thereof that selectively binds to coiled-coil domain containing 102A, transcript variant X1 (CCDC102A) or a variant thereof, comprising at least one of: a variable heavy chain region, wherein the variable heavy chain region comprises a complementarity-determining region heavy chain 1 (CDR-H1) of SEQ ID NO: 640, CDR-H2 of SEQ ID NO: 1182, and CDR-H3 of SEQ ID NO: 1724; and/or a variable light chain region, wherein the variable light chain region comprises a complementarity-determining region light chain 1 (CDR-L1) of SEQ ID NO: 911, CDR-L2 of SEQ ID NO: 1453, and CDR-L3 of SEQ ID NO: 1995. In some embodiments, the variable heavy chain comprises a polypeptide consensus sequence having at least 95% sequence identity to the amino acid sequence of SEQ ID NO: 98, and the variable light chain comprises a polypeptide consensus sequence having at least 95% sequence identity to the amino acid sequence of SEQ ID NO: 369. In some embodiments, the antibody or antigen binding fragment thereof binds a human CCDC102A, mouse CCDC102A, rat CCDC102A, bovine CCDC102A, or cynomolgus monkey CCDC102A. In some embodiments, the human CCDC102A comprises a sequence of SEQ ID NO: 4415.

[0202] Provided herein is an antibody that competes with an antibody or antigen binding fragment of any one of claims 517-520 for binding to CCDC102A, wherein the antibody binds to human CCDC102A or mouse CCDC102A.

[0203] Provided herein is an antibody or an antigen binding fragment thereof that selectively binds to RNA binding motif protein 47, transcript variant X10 (RBM47) or a variant thereof, comprising at least one of: a variable heavy chain region, wherein the variable heavy chain region comprises a complementarity-determining region heavy chain 1 (CDR-H1) of SEQ ID NO: 641, CDR-H2 of SEQ ID NO: 1183, and CDR-H3 of SEQ ID NO: 1725; and/or a variable light chain region, wherein the variable light chain region comprises a complementarity-determining region light chain 1 (CDR-L1) of SEQ ID NO: 912, CDR-L2 of SEQ ID NO: 1454, and CDR-L3 of SEQ ID NO: 1996. In some embodiments, the variable heavy chain comprises a polypeptide consensus sequence having at least 95% sequence identity to the amino acid sequence of SEQ ID NO: 99, and the variable light chain comprises a polypeptide consensus sequence having at least 95% sequence identity to the amino acid sequence of SEQ ID NO: 370. In some embodiments, the antibody or antigen binding fragment thereof binds a human RBM47, mouse RBM47, rat RBM47, bovine RBM47, or cynomolgus monkey RBM47. In some embodiments, the human RBM47 comprises a sequence of SEQ ID NO: 4416.

[0204] Provided herein is an antibody that competes with an antibody or antigen binding fragment of any one of claims 522-525 for binding to RBM47, wherein the antibody binds to human RBM47 or mouse RBM47.

[0205] Provided herein is an antibody or an antigen binding fragment thereof that selectively binds to RAD1 checkpoint DNA exonuclease, transcript variant 1 (RAD1) or a variant thereof, comprising at least one of: a variable heavy chain region, wherein the variable heavy chain region comprises a complementarity-determining region heavy chain 1 (CDR-H1) of SEQ ID NO: 643, CDR-H2 of SEQ ID NO: 1185, and CDR-H3 of SEQ ID NO: 1727; and/or a variable light chain region, wherein the variable light chain region comprises a complementarity-determining region light chain 1 (CDR-L1) of SEQ ID NO: 914, CDR-L2 of SEQ ID NO: 1456, and CDR-L3 of SEQ ID NO: 1998. In some embodiments, the variable heavy chain comprises a polypeptide consensus sequence having at least 95% sequence identity to the amino acid sequence of SEQ ID NO: 101, and the variable light chain comprises a polypeptide consensus sequence having at least 95% sequence identity to the amino acid sequence of SEQ ID NO: 372. In some embodiments, the antibody or antigen binding fragment thereof binds a human RAD1, mouse RAD1, rat RAD1, bovine RAD1, or cynomolgus monkey RAD1. In some embodiments, the human RAD1 comprises a sequence of SEQ ID NO: 4417.

[0206] Provided herein is an antibody that competes with an antibody or antigen binding fragment of any one of claims 527-530 for binding to RAD1, wherein the antibody binds to human RAD1 or mouse RAD1.

[0207] Provided herein is an antibody or an antigen binding fragment thereof that selectively binds to Microtubule associated scaffold protein 1 (MTUS1) or a variant thereof, comprising at least one of: a variable heavy chain region, wherein the variable heavy chain region comprises a complementarity-determining region heavy chain 1 (CDR-H1) of SEQ ID NO: 643, CDR-H2 of SEQ ID NO: 1185, and CDR-H3 of SEQ ID NO: 1727; and/or a variable light chain region, wherein the variable light chain region comprises a complementarity-determining region light chain 1 (CDR-L1) of SEQ ID NO: 914, CDR-L2 of SEQ ID NO: 1456, and CDR-L3 of SEQ ID NO: 1998. In some embodiments, the variable heavy chain comprises a polypeptide consensus sequence having at least 95% sequence identity to the amino acid sequence of SEQ ID NO: 101, and the variable light chain comprises a polypeptide consensus sequence having at least 95% sequence identity to the amino acid sequence of SEQ ID NO: 372. In some embodiments, the antibody or antigen binding fragment thereof binds a human MTUS1, mouse MTUS1, rat MTUS1, bovine MTUS1, or cynomolgus monkey MTUS1. In some embodiments, the human MTUS1 comprises a sequence of SEQ ID NO: 4418.

[0208] Provided herein is an antibody that competes with an antibody or antigen binding fragment of any one of claims 532-535 for binding to MTUS1, wherein the antibody binds to human MTUS1 or mouse MTUS1.

[0209] Provided herein is an antibody or an antigen binding fragment thereof that selectively binds to kelch like ECH associated protein 1, transcript variant 1 (KEAP1) or a variant thereof, comprising at least one of: a variable heavy chain region, wherein the variable heavy chain region comprises a complementarity-determining region heavy chain 1 (CDR-H1) of SEQ ID NO: 645, CDR-H2 of SEQ ID NO: 1187, and CDR-H3 of SEQ ID NO: 1729; and/or a variable light chain region, wherein the variable light chain region comprises a complementarity-determining region light chain 1 (CDR-L1) of SEQ ID NO: 916, CDR-L2 of SEQ ID NO: 1458, and CDR-L3 of SEQ ID NO: 2000. In some embodiments, the variable heavy chain comprises a polypeptide consensus sequence having at least 95% sequence identity to the amino acid sequence of SEQ ID NO: 103, and the variable light chain comprises a polypeptide consensus sequence having at least 95% sequence identity to the amino acid sequence of SEQ ID NO: 374. In some embodiments, the antibody or antigen binding fragment thereof binds a human KEAP1, mouse KEAP1, rat KEAP1, bovine KEAP1, or cynomolgus monkey KEAP1. In some embodiments, the human KEAP1 comprises a sequence of SEQ ID NO: 4385.

[0210] Provided herein is an antibody that competes with an antibody or antigen binding fragment of any one of claims 537-540 for binding to KEAP1, wherein the antibody binds to human KEAP1 or mouse KEAP1.

[0211] Provided herein is an antibody or an antigen binding fragment thereof that selectively binds to PNMA family member 5, transcript variant 2 (PNMA5) or a variant thereof, comprising at least one of: a variable heavy chain region, wherein the variable heavy chain region comprises a complementarity-determining region heavy chain 1 (CDR-H1) of SEQ ID NO: 646, CDR-H2 of SEQ ID NO: 1188, and CDR-H3 of SEQ ID NO: 1730; and/or a variable light chain region, wherein the variable light chain region comprises a complementarity-determining region light chain 1 (CDR-L1) of SEQ ID NO: 917, CDR-L2 of SEQ ID NO: 1459, and CDR-L3 of SEQ ID NO: 2001. In some embodiments, the variable heavy chain comprises a polypeptide consensus sequence having at least 95% sequence identity to the amino acid sequence of SEQ ID NO: 104, and the variable light chain comprises a polypeptide consensus sequence having at least 95% sequence identity to the amino acid sequence of SEQ ID NO: 375. In some embodiments, the antibody or antigen binding fragment thereof binds a human PNMA5, mouse PNMA5, rat PNMA5, bovine PNMA5, or cynomolgus monkey PNMA5. In some embodiments, the human PNMA5 comprises a sequence of SEQ ID NO: 4357.

[0212] Provided herein is an antibody that competes with an antibody or antigen binding fragment of any one of claims 542-545 for binding to PNMA5, wherein the antibody binds to human PNMA5 or mouse PNMA5.

[0213] Provided herein is an antibody or an antigen binding fragment thereof that selectively binds to G protein-coupled receptor 83, transcript variant 1 (GPR83) or a variant thereof, comprising at least one of: a variable heavy chain region, wherein the variable heavy chain region comprises a complementarity-determining region heavy chain 1 (CDR-H1) of SEQ ID NO: 650, CDR-H2 of SEQ ID NO: 1192, and CDR-H3 of SEQ ID NO: 1734; and/or a variable light chain region, wherein the variable light chain region comprises a complementarity-determining region light chain 1 (CDR-L1) of SEQ ID NO: 921, CDR-L2 of SEQ ID NO: 1463, and CDR-L3 of SEQ ID NO: 2005. In some embodiments, the variable heavy chain comprises a polypeptide consensus sequence having at least 95% sequence identity to the amino acid sequence of SEQ ID NO: 108, and the variable light chain comprises a polypeptide consensus sequence having at least 95% sequence identity to the amino acid sequence of SEQ ID NO: 379. In some embodiments, the antibody or antigen binding fragment thereof binds a human GPR83, mouse GPR83, rat GPR83, bovine GPR83, or cynomolgus monkey GPR83. In some embodiments, the human GPR83 comprises a sequence of SEQ ID NO: 4419.

[0214] Provided herein is an antibody that competes with an antibody or antigen binding fragment of any one of claims 547-550 for binding to GPR83, wherein the antibody binds to human GPR83 or mouse GPR83.

[0215] Provided herein is an antibody or an antigen binding fragment thereof that selectively binds to CDP-diacylglycerol synthase 1 (CDS1) or a variant thereof, comprising at least one of: a variable heavy chain region, wherein the variable heavy chain region comprises a complementarity-determining region heavy chain 1 (CDR-H1) of SEQ ID NO: 651, CDR-H2 of SEQ ID NO: 1193, and CDR-H3 of SEQ ID NO: 1735; and/or a variable light chain region, wherein the variable light chain region comprises a complementarity-determining region light chain 1 (CDR-L1) of SEQ ID NO: 922, CDR-L2 of SEQ ID NO: 1464, and CDR-L3 of SEQ ID NO: 2006. In some embodiments, the variable heavy chain comprises a polypeptide consensus sequence having at least 95% sequence identity to the amino acid sequence of SEQ ID NO: 109, and the variable light chain comprises a polypeptide consensus sequence having at least 95% sequence identity to the amino acid sequence of SEQ ID NO: 380. In some embodiments, the antibody or antigen binding fragment thereof binds a human CDS1, mouse CDS1, rat CDS1, bovine CDS1, or cynomolgus monkey CDS1. In some embodiments, the human CDS1 comprises a sequence of SEQ ID NO: 4420.

[0216] Provided herein is an antibody that competes with an antibody or antigen binding fragment of any one of claims 552-555 for binding to CDS1, wherein the antibody binds to human CDS1 or mouse CDS1.

[0217] Provided herein is an antibody or an antigen binding fragment thereof that selectively binds to dynein axonemal assembly factor 3, transcript variant 3 (DNAAF3) or a variant thereof, comprising at least one of: a variable heavy chain region, wherein the variable heavy chain region comprises a complementarity-determining region heavy chain 1 (CDR-H1) of SEQ ID NO: 651, CDR-H2 of SEQ ID NO: 1193, and CDR-H3 of SEQ ID NO: 1735; and/or a variable light chain region, wherein the variable light chain region comprises a complementarity-determining region light chain 1 (CDR-L1) of SEQ ID NO: 922, CDR-L2 of SEQ ID NO: 1464, and CDR-L3 of SEQ ID NO: 2006. In some embodiments, the variable heavy chain comprises a polypeptide consensus sequence having at least 95% sequence identity to the amino acid sequence of SEQ ID NO: 109, and the variable light chain comprises a polypeptide consensus sequence having at least 95% sequence identity to the amino acid sequence of SEQ ID NO: 380. In some embodiments, the antibody or antigen binding fragment thereof binds a human DNAAF3, mouse DNAAF3, rat DNAAF3, bovine DNAAF3, or cynomolgus monkey DNAAF3. In some embodiments, the human DNAAF3 comprises a sequence of SEQ ID NO: 4421.

[0218] Provided herein is an antibody that competes with an antibody or antigen binding fragment of any one of claims 557-560 for binding to DNAAF3, wherein the antibody binds to human DNAAF3 or mouse DNAAF3.

[0219] Provided herein is an antibody or an antigen binding fragment thereof that selectively binds to copine 1, transcript variant 2 (CPNE1) or a variant thereof, comprising at least one of: a variable heavy chain region, wherein the variable heavy chain region comprises a complementarity-determining region heavy chain 1 (CDR-H1) of SEQ ID NO: 652, CDR-H2 of SEQ ID NO: 1194, and CDR-H3 of SEQ ID NO: 1736; and/or a variable light chain region, wherein the variable light chain region comprises a complementarity-determining region light chain 1 (CDR-L1) of SEQ ID NO: 923, CDR-L2 of SEQ ID NO: 1465, and CDR-L3 of SEQ ID NO: 2007. In some embodiments, the variable heavy chain comprises a polypeptide consensus sequence having at least 95% sequence identity to the amino acid sequence of SEQ ID NO: 110, and the variable light chain comprises a polypeptide consensus sequence having at least 95% sequence identity to the amino acid sequence of SEQ ID NO: 381. In some embodiments, the antibody or antigen binding fragment thereof binds a human CPNE1, mouse CPNE1, rat CPNE1, bovine CPNE1, or cynomolgus monkey CPNE1. In some embodiments, the human CPNE1 comprises a sequence of SEQ ID NO: 4422.

[0220] Provided herein is an antibody that competes with an antibody or antigen binding fragment of any one of claims 562-565 for binding to CPNE1, wherein the antibody binds to human CPNE1 or mouse CPNE1.

[0221] Provided herein is an antibody or an antigen binding fragment thereof that selectively binds to aarF domain containing kinase 5 (ADCK5) or a variant thereof, comprising at least one of: a variable heavy chain region, wherein the variable heavy chain region comprises a complementarity-determining region heavy chain 1 (CDR-H1) of SEQ ID NO: 653, CDR-H2 of SEQ ID NO: 1195, and CDR-H3 of SEQ ID NO: 1737; and/or a variable light chain region, wherein the variable light chain region comprises a complementarity-determining region light chain 1 (CDR-L1) of SEQ ID NO: 924, CDR-L2 of SEQ ID NO: 1466, and CDR-L3 of SEQ ID NO: 2008. In some embodiments, the variable heavy chain comprises a polypeptide consensus sequence having at least 95% sequence identity to the amino acid sequence of SEQ ID NO: 111, and the variable light chain comprises a polypeptide consensus sequence having at least 95% sequence identity to the amino acid sequence of SEQ ID NO: 382. In some embodiments, the antibody or antigen binding fragment thereof binds a human ADCK5, mouse ADCK5, rat ADCK5, bovine ADCK5, or cynomolgus monkey ADCK5. In some embodiments, the human ADCK5 comprises a sequence of SEQ ID NO: 4423.

[0222] Provided herein is an antibody that competes with an antibody or antigen binding fragment of any one of claims 567-570 for binding to ADCK5, wherein the antibody binds to human ADCK5 or mouse ADCK5.

[0223] Provided herein is an antibody or an antigen binding fragment thereof that selectively binds to crystallin alpha B, transcript variant 2 (CRYAB) or a variant thereof, comprising at least one of: a variable heavy chain region, wherein the variable heavy chain region comprises a complementarity-determining region heavy chain 1 (CDR-H1) of SEQ ID NO: 655, CDR-H2 of SEQ ID NO: 1197, and CDR-H3 of SEQ ID NO: 1739; and/or a variable light chain region, wherein the variable light chain region comprises a complementarity-determining region light chain 1 (CDR-L1) of SEQ ID NO: 926, CDR-L2 of SEQ ID NO: 1468, and CDR-L3 of SEQ ID NO: 2010. In some embodiments, the variable heavy chain comprises a polypeptide consensus sequence having at least 95% sequence identity to the amino acid sequence of SEQ ID NO: 113, and the variable light chain comprises a polypeptide consensus sequence having at least 95% sequence identity to the amino acid sequence of SEQ ID NO: 384. In some embodiments, the antibody or antigen binding fragment thereof binds a human CRYAB, mouse CRYAB, rat CRYAB, bovine CRYAB, or cynomolgus monkey CRYAB. In some embodiments, the human CRYAB comprises a sequence of SEQ ID NO: 4424.

[0224] Provided herein is an antibody that competes with an antibody or antigen binding fragment of any one of claims 572-575 for binding to CRYAB, wherein the antibody binds to human CRYAB or mouse CRYAB.

[0225] Provided herein is an antibody or an antigen binding fragment thereof that selectively binds to hematopoietic cell-specific Lyn substrate 1, transcript variant 1 (HCLS1) or a variant thereof, comprising at least one of: a variable heavy chain region, wherein the variable heavy chain region comprises a complementarity-determining region heavy chain 1 (CDR-H1) of SEQ ID NO: 656, CDR-H2 of SEQ ID NO: 1198, and CDR-H3 of SEQ ID NO: 1740; and/or a variable light chain region, wherein the variable light chain region comprises a complementarity-determining region light chain 1 (CDR-L1) of SEQ ID NO: 927, CDR-L2 of SEQ ID NO: 1469, and CDR-L3 of SEQ ID NO: 2011. In some embodiments, the variable heavy chain comprises a polypeptide consensus sequence having at least 95% sequence identity to the amino acid sequence of SEQ ID NO: 114, and the variable light chain comprises a polypeptide consensus sequence having at least 95% sequence identity to the amino acid sequence of SEQ ID NO: 385. In some embodiments, the antibody or antigen binding fragment thereof binds a human HCLS1, mouse HCLS1, rat HCLS1, bovine HCLS1, or cynomolgus monkey HCLS1. In some embodiments, the human HCLS1 comprises a sequence of SEQ ID NO: 4425.

[0226] Provided herein is an antibody that competes with an antibody or antigen binding fragment of any one of claims 577-580 for binding to HCLS1, wherein the antibody binds to human HCLS1 or mouse HCLS1.

[0227] Provided herein is an antibody or an antigen binding fragment thereof that selectively binds to aldo-keto reductase family 1 member B, transcript variant 1 (AKR1B1) or a variant thereof, comprising at least one of: a variable heavy chain region, wherein the variable heavy chain region comprises a complementarity-determining region heavy chain 1 (CDR-H1) of SEQ ID NO: 657, CDR-H2 of SEQ ID NO: 1199, and CDR-H3 of SEQ ID NO: 1741; and/or a variable light chain region, wherein the variable light chain region comprises a complementarity-determining region light chain 1 (CDR-L1) of SEQ ID NO: 928, CDR-L2 of SEQ ID NO: 1470, and CDR-L3 of SEQ ID NO: 2012. In some embodiments, the variable heavy chain comprises a polypeptide consensus sequence having at least 95% sequence identity to the amino acid sequence of SEQ ID NO: 115, and the variable light chain comprises a polypeptide consensus sequence having at least 95% sequence identity to the amino acid sequence of SEQ ID NO: 386. In some embodiments, the antibody or antigen binding fragment thereof binds a human AKR1B1, mouse AKR1B1, rat AKR1B1, bovine AKR1B1, or cynomolgus monkey AKR1B1. In some embodiments, the human AKR1B1 comprises a sequence of SEQ ID NO: 4426.

[0228] Provided herein is an antibody that competes with an antibody or antigen binding fragment of any one of claims 582-585 for binding to AKR1B1, wherein the antibody binds to human AKR1B1 or mouse AKR1B1.

[0229] Provided herein is an antibody or an antigen binding fragment thereof that selectively binds to surfeit 6, transcript variant 1 (SURF6) or a variant thereof, comprising at least one of: a variable heavy chain region, wherein the variable heavy chain region comprises a complementarity-determining region heavy chain 1 (CDR-H1) of SEQ ID NO: 658, CDR-H2 of SEQ ID NO: 1200, and CDR-H3 of SEQ ID NO: 1742; and/or a variable light chain region, wherein the variable light chain region comprises a complementarity-determining region light chain 1 (CDR-L1) of SEQ ID NO: 929, CDR-L2 of SEQ ID NO: 1471, and CDR-L3 of SEQ ID NO: 2013. In some embodiments, the variable heavy chain comprises a polypeptide consensus sequence having at least 95% sequence identity to the amino acid sequence of SEQ ID NO: 116, and the variable light chain comprises a polypeptide consensus sequence having at least 95% sequence identity to the amino acid sequence of SEQ ID NO: 387. In some embodiments, the antibody or antigen binding fragment thereof binds a human SURF6, mouse SURF6, rat SURF6, bovine SURF6, or cynomolgus monkey SURF6. In some embodiments, the human SURF6 comprises a sequence of SEQ ID NO: 4427.

[0230] Provided herein is an antibody that competes with an antibody or antigen binding fragment of any one of claims 587-590 for binding to SURF6, wherein the antibody binds to human SURF6 or mouse SURF6.

[0231] Provided herein is an antibody or an antigen binding fragment thereof that selectively binds to proliferating cell nuclear antigen, transcript variant 1 (PCNA) or a variant thereof, comprising at least one of: a variable heavy chain region, wherein the variable heavy chain region comprises a complementarity-determining region heavy chain 1 (CDR-H1) of SEQ ID NO: 658, CDR-H2 of SEQ ID NO: 1200, and CDR-H3 of SEQ ID NO: 1742; and/or a variable light chain region, wherein the variable light chain region comprises a complementarity-determining region light chain 1 (CDR-L1) of SEQ ID NO: 929, CDR-L2 of SEQ ID NO: 1471, and CDR-L3 of SEQ ID NO: 2013. In some embodiments, the variable heavy chain comprises a polypeptide consensus sequence having at least 95% sequence identity to the amino acid sequence of SEQ ID NO: 116, and the variable light chain comprises a polypeptide consensus sequence having at least 95% sequence identity to the amino acid sequence of SEQ ID NO: 387. In some embodiments, the antibody or antigen binding fragment thereof binds a human PCNA, mouse PCNA, rat PCNA, bovine PCNA, or cynomolgus monkey PCNA. In some embodiments, the human PCNA comprises a sequence of SEQ ID NO: 4428.

[0232] Provided herein is an antibody that competes with an antibody or antigen binding fragment of any one of claims 592-595 for binding to PCNA, wherein the antibody binds to human PCNA or mouse PCNA.

[0233] Provided herein is an antibody or an antigen binding fragment thereof that selectively binds to S100 calcium binding protein B (S100B) or a variant thereof, comprising at least one of: a variable heavy chain region, wherein the variable heavy chain region comprises a complementarity-determining region heavy chain 1 (CDR-H1) of SEQ ID NO: 663, CDR-H2 of SEQ ID NO: 1205, and CDR-H3 of SEQ ID NO: 1747; and/or a variable light chain region, wherein the variable light chain region comprises a complementarity-determining region light chain 1 (CDR-L1) of SEQ ID NO: 934, CDR-L2 of SEQ ID NO: 1476, and CDR-L3 of SEQ ID NO: 2018. In some embodiments, the variable heavy chain comprises a polypeptide consensus sequence having at least 95% sequence identity to the amino acid sequence of SEQ ID NO: 121, and the variable light chain comprises a polypeptide consensus sequence having at least 95% sequence identity to the amino acid sequence of SEQ ID NO: 392. In some embodiments, he antibody or antigen binding fragment thereof binds a human S100B, mouse S100B, rat S100B, bovine S100B, or cynomolgus monkey S100B. In some embodiments, the human S100B comprises a sequence of SEQ ID NO: 4429.

[0234] Provided herein is an antibody that competes with an antibody or antigen binding fragment of any one of claims 597-600 for binding to S100B, wherein the antibody binds to human S100B or mouse S100B.

[0235] Provided herein is an antibody or an antigen binding fragment thereof that selectively binds to checkpoint kinase 2, transcript variant 3 (CHEK2) or a variant thereof, comprising at least one of: a variable heavy chain region, wherein the variable heavy chain region comprises a complementarity-determining region heavy chain 1 (CDR-H1) of SEQ ID NO: 664, CDR-H2 of SEQ ID NO: 1206, and CDR-H3 of SEQ ID NO: 1748; and/or a variable light chain region, wherein the variable light chain region comprises a complementarity-determining region light chain 1 (CDR-L1) of SEQ ID NO: 935, CDR-L2 of SEQ ID NO: 1477, and CDR-L3 of SEQ ID NO: 2019. In some embodiments, the variable heavy chain comprises a polypeptide consensus sequence having at least 95% sequence identity to the amino acid sequence of SEQ ID NO: 122, and the variable light chain comprises a polypeptide consensus sequence having at least 95% sequence identity to the amino acid sequence of SEQ ID NO: 393. In some embodiments, the antibody or antigen binding fragment thereof binds a human CHEK2, mouse CHEK2, rat CHEK2, bovine CHEK2, or cynomolgus monkey CHEK2. In some embodiments, the human CHEK2 comprises a sequence of SEQ ID NO: 4430.

[0236] Provided herein is an antibody that competes with an antibody or antigen binding fragment of any one of claims 602-605 for binding to CHEK2, wherein the antibody binds to human CHEK2 or mouse CHEK2.

[0237] Provided herein is an antibody or an antigen binding fragment thereof that selectively binds to ankyrin repeat domain 53, transcript variant 2 (ANKRD53) or a variant thereof, comprising at least one of: a variable heavy chain region, wherein the variable heavy chain region comprises a complementarity-determining region heavy chain 1 (CDR-H1) of SEQ ID NO: 670, CDR-H2 of SEQ ID NO: 1212, and CDR-H3 of SEQ ID NO: 1754; and/or a variable light chain region, wherein the variable light chain region comprises a complementarity-determining region light chain 1 (CDR-L1) of SEQ ID NO: 941, CDR-L2 of SEQ ID NO: 1483, and CDR-L3 of SEQ ID NO: 2025. In some embodiments, the variable heavy chain comprises a polypeptide consensus sequence having at least 95% sequence identity to the amino acid sequence of SEQ ID NO: 128, and

[0238] the variable light chain comprises a polypeptide consensus sequence having at least 95% sequence identity to the amino acid sequence of SEQ ID NO: 399. In some embodiments, the antibody or antigen binding fragment thereof binds a human ANKRD53, mouse ANKRD53, rat ANKRD53, bovine ANKRD53, or cynomolgus monkey ANKRD53. In some embodiments, the human ANKRD53 comprises a sequence of SEQ ID NO: 4431.

[0239] Provided herein is an antibody that competes with an antibody or antigen binding fragment of any one of claims 607-610 for binding to ANKRD53, wherein the antibody binds to human ANKRD53 or mouse ANKRD53.

[0240] Provided herein is an antibody or an antigen binding fragment thereof that selectively binds to Killer cell lectin like receptor g2 (KLRG2) or a variant thereof, comprising at least one of: a variable heavy chain region, wherein the variable heavy chain region comprises a complementarity-determining region heavy chain 1 (CDR-H1) of SEQ ID NO: 683, CDR-H2 of SEQ ID NO: 1225, and CDR-H3 of SEQ ID NO: 1767; and/or a variable light chain region, wherein the variable light chain region comprises a complementarity-determining region light chain 1 (CDR-L1) of SEQ ID NO: 954, CDR-L2 of SEQ ID NO: 1496, and CDR-L3 of SEQ ID NO: 2038. In some embodiments, the variable heavy chain comprises a polypeptide consensus sequence having at least 95% sequence identity to the amino acid sequence of SEQ ID NO: 141, and the variable light chain comprises a polypeptide consensus sequence having at least 95% sequence identity to the amino acid sequence of SEQ ID NO: 412. In some embodiments, the antibody or antigen binding fragment thereof binds a human KLRG2, mouse KLRG2, rat KLRG2, bovine KLRG2, or cynomolgus monkey KLRG2. In some embodiments, the human KLRG2 comprises a sequence of SEQ ID NO: 4432.

[0241] Provided herein is an antibody that competes with an antibody or antigen binding fragment of any one of claims 612-615 for binding to KLRG2, wherein the antibody binds to human KLRG2 or mouse KLRG2.

[0242] Provided herein is an antibody or an antigen binding fragment thereof that selectively binds to tripartite motif containing 35, transcript variant 1 (TRIM35) or a variant thereof, comprising at least one of: a variable heavy chain region, wherein the variable heavy chain region comprises a complementarity-determining region heavy chain 1 (CDR-H1) of SEQ ID NO: 683, CDR-H2 of SEQ ID NO: 1225, and CDR-H3 of SEQ ID NO: 1767; and/or a variable light chain region, wherein the variable light chain region comprises a complementarity-determining region light chain 1 (CDR-L1) of SEQ ID NO: 954, CDR-L2 of SEQ ID NO: 1496, and CDR-L3 of SEQ ID NO: 2038. In some embodiments, the variable heavy chain comprises a polypeptide consensus sequence having at least 95% sequence identity to the amino acid sequence of SEQ ID NO: 141, and the variable light chain comprises a polypeptide consensus sequence having at least 95% sequence identity to the amino acid sequence of SEQ ID NO: 412. In some embodiments, the antibody or antigen binding fragment thereof binds a human TRIM35, mouse TRIM35, rat TRIM35, bovine TRIM35, or cynomolgus monkey TRIM35. In some embodiments, the human TRIM35 comprises a sequence of SEQ ID NO: 4433.

[0243] Provided herein is an antibody that competes with an antibody or antigen binding fragment of any one of claims 617-620 for binding to TRIM35, wherein the antibody binds to human TRIM35 or mouse TRIM35.

[0244] Provided herein is an antibody or an antigen binding fragment thereof that selectively binds to FMR1 autosomal homolog 2 (FXR2) or a variant thereof, comprising at least one of: a variable heavy chain region, wherein the variable heavy chain region comprises a complementarity-determining region heavy chain 1 (CDR-H1) of SEQ ID NO: 683, CDR-H2 of SEQ ID NO: 1225, and CDR-H3 of SEQ ID NO: 1767; and/or a variable light chain region, wherein the variable light chain region comprises a complementarity-determining region light chain 1 (CDR-L1) of SEQ ID NO: 954, CDR-L2 of SEQ ID NO: 1496, and CDR-L3 of SEQ ID NO: 2038. In some embodiments, the variable heavy chain comprises a polypeptide consensus sequence having at least 95% sequence identity to the amino acid sequence of SEQ ID NO: 141, and the variable light chain comprises a polypeptide consensus sequence having at least 95% sequence identity to the amino acid sequence of SEQ ID NO: 412. In some embodiments, the antibody or antigen binding fragment thereof binds a human FXR2, mouse FXR2, rat FXR2, bovine FXR2, or cynomolgus monkey FXR2. In some embodiments, the human FXR2 comprises a sequence of SEQ ID NO: 4434.

[0245] Provided herein is an antibody that competes with an antibody or antigen binding fragment of any one of claims 622-625 for binding to FXR2, wherein the antibody binds to human FXR2 or mouse FXR2.

[0246] Provided herein is an antibody or an antigen binding fragment thereof that selectively binds to annexin A1 (ANXA1) or a variant thereof, comprising at least one of: a variable heavy chain region, wherein the variable heavy chain region comprises a complementarity-determining region heavy chain 1 (CDR-H1) of SEQ ID NO: 686, CDR-H2 of SEQ ID NO: 1228, and CDR-H3 of SEQ ID NO: 1770; and/or a variable light chain region, wherein the variable light chain region comprises a complementarity-determining region light chain 1 (CDR-L1) of SEQ ID NO: 957, CDR-L2 of SEQ ID NO: 1499, and CDR-L3 of SEQ ID NO: 2041. In some embodiments, the variable heavy chain comprises a polypeptide consensus sequence having at least 95% sequence identity to the amino acid sequence of SEQ ID NO: 144, and the variable light chain comprises a polypeptide consensus sequence having at least 95% sequence identity to the amino acid sequence of SEQ ID NO: 415. In some embodiments, the antibody or antigen binding fragment thereof binds a human ANXA1, mouse ANXA1, rat ANXA1, bovine ANXA1, or cynomolgus monkey ANXA1. In some embodiments, the human ANXA1 comprises a sequence of SEQ ID NO: 4435.

[0247] Provided herein is an antibody that competes with an antibody or antigen binding fragment of any one of claims 627-630 for binding to ANXA1, wherein the antibody binds to human ANXA1 or mouse ANXA1.

[0248] Provided herein is an antibody or an antigen binding fragment thereof that selectively binds to zinc finger protein 287, transcript variant 2 (ZNF287) or a variant thereof, comprising at least one of: a variable heavy chain region, wherein the variable heavy chain region comprises a complementarity-determining region heavy chain 1 (CDR-H1) of SEQ ID NO: 690, CDR-H2 of SEQ ID NO: 1232, and CDR-H3 of SEQ ID NO: 1774; and/or a variable light chain region, wherein the variable light chain region comprises a complementarity-determining region light chain 1 (CDR-L1) of SEQ ID NO: 961, CDR-L2 of SEQ ID NO: 1503, and CDR-L3 of SEQ ID NO: 2045. In some embodiments, the variable heavy chain comprises a polypeptide consensus sequence having at least 95% sequence identity to the amino acid sequence of SEQ ID NO: 148, and the variable light chain comprises a polypeptide consensus sequence having at least 95% sequence identity to the amino acid sequence of SEQ ID NO: 419. In some embodiments, the antibody or antigen binding fragment thereof binds a human ZNF287, mouse ZNF287, rat ZNF287, bovine ZNF287, or cynomolgus monkey ZNF287. In some embodiments, the human ZNF287 comprises a sequence of SEQ ID NO: 4436.

[0249] Provided herein is an antibody that competes with an antibody or antigen binding fragment of any one of claims 632-635 for binding to ZNF287, wherein the antibody binds to human ZNF287 or mouse ZNF287.

[0250] Provided herein is an antibody or an antigen binding fragment thereof that selectively binds to family with sequence similarity 177 member A1, transcript variant 2 (FAM177A1) or a variant thereof, comprising at least one of: a variable heavy chain region, wherein the variable heavy chain region comprises a complementarity-determining region heavy chain 1 (CDR-H1) of SEQ ID NO: 698, CDR-H2 of SEQ ID NO: 1240, and CDR-H3 of SEQ ID NO: 1782; and/or a variable light chain region, wherein the variable light chain region comprises a complementarity-determining region light chain 1 (CDR-L1) of SEQ ID NO: 969, CDR-L2 of SEQ ID NO: 1511, and CDR-L3 of SEQ ID NO: 2053. In some embodiments, the variable heavy chain comprises a polypeptide consensus sequence having at least 95% sequence identity to the amino acid sequence of SEQ ID NO: 156, and the variable light chain comprises a polypeptide consensus sequence having at least 95% sequence identity to the amino acid sequence of SEQ ID NO: 427. In some embodiments, the antibody or antigen binding fragment thereof binds a human FAM177A1, mouse FAM177A1, rat FAM177A1, bovine FAM177A1, or cynomolgus monkey FAM177A1. In some embodiments, the human FAM177A1 comprises a sequence of SEQ ID NO: 4437.

[0251] Provided herein is an antibody that competes with an antibody or antigen binding fragment of any one of claims 637-640 for binding to FAM177A1, wherein the antibody binds to human FAM177A1 or mouse FAM177A1.

[0252] Provided herein is an antibody or an antigen binding fragment thereof that selectively binds to quinoid dihydropteridine reductase, transcript variant 1 (QDPR) or a variant thereof, comprising at least one of: a variable heavy chain region, wherein the variable heavy chain region comprises a complementarity-determining region heavy chain 1 (CDR-H1) of SEQ ID NO: 701, CDR-H2 of SEQ ID NO: 1243, and CDR-H3 of SEQ ID NO: 1785; and/or a variable light chain region, wherein the variable light chain region comprises a complementarity-determining region light chain 1 (CDR-L1) of SEQ ID NO: 972, CDR-L2 of SEQ ID NO: 1514, and CDR-L3 of SEQ ID NO: 2056. In some embodiments, the variable heavy chain comprises a polypeptide consensus sequence having at least 95% sequence identity to the amino acid sequence of SEQ ID NO: 159, and the variable light chain comprises a polypeptide consensus sequence having at least 95% sequence identity to the amino acid sequence of SEQ ID NO: 430. In some embodiments, the antibody or antigen binding fragment thereof binds a human QDPR, mouse QDPR, rat QDPR, bovine QDPR, or cynomolgus monkey QDPR. In some embodiments, the human QDPR comprises a sequence of SEQ ID NO: 4438.

[0253] Provided herein is an antibody that competes with an antibody or antigen binding fragment of any one of claims 642-645 for binding to QDPR, wherein the antibody binds to human QDPR or mouse QDPR.

[0254] Provided herein is an antibody or an antigen binding fragment thereof that selectively binds to ELK2, member of ETS oncogene family, pseudogene 1 (BC031259.1_frag) or a variant thereof, comprising at least one of: a variable heavy chain region, wherein the variable heavy chain region comprises a complementarity-determining region heavy chain 1 (CDR-H1) of SEQ ID NO: 703, CDR-H2 of SEQ ID NO: 1245, and CDR-H3 of SEQ ID NO: 1787; and/or a variable light chain region, wherein the variable light chain region comprises a complementarity-determining region light chain 1 (CDR-L1) of SEQ ID NO: 974, CDR-L2 of SEQ ID NO: 1516, and CDR-L3 of SEQ ID NO: 2058. In some embodiments, the variable heavy chain comprises a polypeptide consensus sequence having at least 95% sequence identity to the amino acid sequence of SEQ ID NO: 161, and the variable light chain comprises a polypeptide consensus sequence having at least 95% sequence identity to the amino acid sequence of SEQ ID NO: 432. In some embodiments, the antibody or antigen binding fragment thereof binds a human BC031259.1_frag, mouse BC031259.1_frag, rat BC031259.1_frag, bovine BC031259.1_frag, or cynomolgus monkey BC031259.1_frag. In some embodiments, the human BC031259.1_frag comprises a sequence of SEQ ID NO: 4439.

[0255] Provided herein is an antibody that competes with an antibody or antigen binding fragment of any one of claims 647-650 for binding to BC031259.1_frag, wherein the antibody binds to human BC031259.1_frag or mouse BC031259.1_frag.

[0256] Provided herein is an antibody or an antigen binding fragment thereof that selectively binds to methyltransferase like 21C (METTL21C) or a variant thereof, comprising at least one of: a variable heavy chain region, wherein the variable heavy chain region comprises a complementarity-determining region heavy chain 1 (CDR-H1) of SEQ ID NO: 703, CDR-H2 of SEQ ID NO: 1245, and CDR-H3 of SEQ ID NO: 1787; and/or a variable light chain region, wherein the variable light chain region comprises a complementarity-determining region light chain 1 (CDR-L1) of SEQ ID NO: 974, CDR-L2 of SEQ ID NO: 1516, and CDR-L3 of SEQ ID NO: 2058. In some embodiments, the variable heavy chain comprises a polypeptide consensus sequence having at least 95% sequence identity to the amino acid sequence of SEQ ID NO: 161, and the variable light chain comprises a polypeptide consensus sequence having at least 95% sequence identity to the amino acid sequence of SEQ ID NO: 432. In some embodiments, the antibody or antigen binding fragment thereof binds a human METTL21C, mouse METTL21C, rat METTL21C, bovine METTL21C, or cynomolgus monkey METTL21C. In some embodiments, the human METTL21C comprises a sequence of SEQ ID NO: 4440.

[0257] Provided herein is an antibody that competes with an antibody or antigen binding fragment of any one of claims 652-655 for binding to METTL2IC, wherein the antibody binds to human METTL2IC or mouse METTL21C.

[0258] Provided herein is an antibody or an antigen binding fragment thereof that selectively binds to hydroxymethylbilane synthase, transcript variant X3 (HMBS) or a variant thereof, comprising at least one of: a variable heavy chain region, wherein the variable heavy chain region comprises a complementarity-determining region heavy chain 1 (CDR-H1) of SEQ ID NO: 706, CDR-H2 of SEQ ID NO: 1248, and CDR-H3 of SEQ ID NO: 1790; and/or a variable light chain region, wherein the variable light chain region comprises a complementarity-determining region light chain 1 (CDR-L1) of SEQ ID NO: 977, CDR-L2 of SEQ ID NO: 1519, and CDR-L3 of SEQ ID NO: 2061. In some embodiments, the variable heavy chain comprises a polypeptide consensus sequence having at least 95% sequence identity to the amino acid sequence of SEQ ID NO: 164, and the variable light chain comprises a polypeptide consensus sequence having at least 95% sequence identity to the amino acid sequence of SEQ ID NO: 435. In some embodiments, the antibody or antigen binding fragment thereof binds a human HMBS, mouse HMBS, rat HMBS, bovine HMBS, or cynomolgus monkey HMBS. In some embodiments, the human HMBS comprises a sequence of SEQ ID NO: 4441.

[0259] Provided herein is an antibody that competes with an antibody or antigen binding fragment of any one of claims 657-660 for binding to HMBS, wherein the antibody binds to human HMBS or mouse HMBS.

[0260] Provided herein is an antibody or an antigen binding fragment thereof that selectively binds to hook microtubule tethering protein 2, transcript variant 2 (HOOK2) or a variant thereof, comprising at least one of: a variable heavy chain region, wherein the variable heavy chain region comprises a complementarity-determining region heavy chain 1 (CDR-H1) of SEQ ID NO: 706, CDR-H2 of SEQ ID NO: 1248, and CDR-H3 of SEQ ID NO: 1790; and/or a variable light chain region, wherein the variable light chain region comprises a complementarity-determining region light chain 1 (CDR-L1) of SEQ ID NO: 977, CDR-L2 of SEQ ID NO: 1519, and CDR-L3 of SEQ ID NO: 2061. In some embodiments, the variable heavy chain comprises a polypeptide consensus sequence having at least 95% sequence identity to the amino acid sequence of SEQ ID NO: 164, and the variable light chain comprises a polypeptide consensus sequence having at least 95% sequence identity to the amino acid sequence of SEQ ID NO: 435. In some embodiments, the antibody or antigen binding fragment thereof binds a human HOOK2, mouse HOOK2, rat HOOK2, bovine HOOK2, or cynomolgus monkey HOOK2. In some embodiments, the human HOOK2 comprises a sequence of SEQ ID NO: 4442.

[0261] Provided herein is an antibody that competes with an antibody or antigen binding fragment of any one of claims 662-665 for binding to HOOK2, wherein the antibody binds to human HOOK2 or mouse HOOK2.

[0262] Provided herein is an antibody or an antigen binding fragment thereof that selectively binds to Magel2 (Q6ir13_frag) or a variant thereof, comprising at least one of:
[0263] a variable heavy chain region, wherein the variable heavy chain region comprises a complementarity-determining region heavy chain 1 (CDR-H1) of SEQ ID NO: 713, CDR-H2 of SEQ ID NO: 1255, and CDR-H3 of SEQ ID NO: 1797; and/or a variable light chain region, wherein the variable light chain region comprises a complementarity-determining region light chain 1 (CDR-L1) of SEQ ID NO: 984, CDR-L2 of SEQ ID NO: 1526, and CDR-L3 of SEQ ID NO: 2068. In some embodiments, the variable heavy chain comprises a polypeptide consensus sequence having at least 95% sequence identity to the amino acid sequence of SEQ ID NO: 171, and the variable light chain comprises a polypeptide consensus sequence having at least 95% sequence identity to the amino acid sequence of SEQ ID NO: 442. In some embodiments, the antibody or antigen binding fragment thereof binds a human Q6ir13_frag, mouse Q6ir13_frag, rat Q6ir13_frag, bovine Q6ir13_frag, or cynomolgus monkey Q6ir13_frag. In some embodiments, the human Q6ir13_frag comprises a sequence of SEQ ID NO: 4443.

[0264] Provided herein is an antibody that competes with an antibody or antigen binding fragment of any one of claims 667-670 for binding to Q6ir13_frag, wherein the antibody binds to human Q6ir13_frag or mouse Q6ir13_frag.

[0265] Provided herein is an antibody or an antigen binding fragment thereof that selectively binds to serine and arginine rich splicing factor 3, transcript variant 1 (SRSF3) or a variant thereof, comprising at least one of: a variable heavy chain region, wherein the variable heavy chain region comprises a complementarity-determining region heavy chain 1 (CDR-H1) of SEQ ID NO: 713, CDR-H2 of SEQ ID NO: 1255, and CDR-H3 of SEQ ID NO: 1797; and/or a variable light chain region, wherein the variable light chain region comprises a complementarity-determining region light chain 1 (CDR-L1) of SEQ ID NO: 984, CDR-L2 of SEQ ID NO: 1526, and CDR-L3 of SEQ ID NO: 2068. In some embodiments, the variable heavy chain comprises a polypeptide consensus sequence having at least 95% sequence identity to the amino acid sequence of SEQ ID NO: 171, and the variable light chain comprises a polypeptide consensus sequence having at least 95% sequence identity to the amino acid sequence of SEQ ID NO: 442. In some embodiments, the antibody or antigen binding fragment thereof binds a human SRSF3, mouse SRSF3, rat SRSF3, bovine SRSF3, or cynomolgus monkey SRSF3. In some embodiments, the human SRSF3 comprises a sequence of SEQ ID NO: 4444.

[0266] Provided herein is an antibody that competes with an antibody or antigen binding fragment of any one of claims 672-675 for binding to SRSF3, wherein the antibody binds to human SRSF3 or mouse SRSF3.

[0267] Provided herein is an antibody or an antigen binding fragment thereof that selectively binds to RAN binding protein 10, transcript variant 1 (RANBP10) or a variant thereof, comprising at least one of: a variable heavy chain region, wherein the variable heavy chain region comprises a complementarity-determining region heavy chain 1 (CDR-H1) of SEQ ID NO: 714, CDR-H2 of SEQ ID NO: 1256, and CDR-H3 of SEQ ID NO: 1798; and/or a variable light chain region, wherein the variable light chain region comprises a complementarity-determining region light chain 1 (CDR-L1) of SEQ ID NO: 985, CDR-L2 of SEQ ID NO: 1527, and CDR-L3 of SEQ ID NO: 2069. In some embodiments, the variable heavy chain comprises a polypeptide consensus sequence having at least 95% sequence identity to the amino acid sequence of SEQ ID NO: 172, and the variable light chain comprises a polypeptide consensus sequence having at least 95% sequence identity to the amino acid sequence of SEQ ID NO: 443. In some embodiments, the antibody or antigen binding fragment thereof binds a human RANBP10, mouse RANBP10, rat RANBP10, bovine RANBP10, or cynomolgus monkey RANBP10. In some embodiments, the human RANBP10 comprises a sequence of SEQ ID NO: 4445.

[0268] Provided herein is an antibody that competes with an antibody or antigen binding fragment of any one of claims 677-680 for binding to RANBP10, wherein the antibody binds to human RANBP10 or mouse RANBP10.

[0269] Provided herein is an antibody or an antigen binding fragment thereof that selectively binds to Wnt family member 9b (WNT9B) or a variant thereof, comprising at least one of: a variable heavy chain region, wherein the variable heavy chain region comprises a complementarity-determining region heavy chain 1 (CDR-H1) of SEQ ID NO: 714, CDR-H2 of SEQ ID NO: 1256, and CDR-H3 of SEQ ID NO: 1798; and/or a variable light chain region, wherein the variable light chain region comprises a complementarity-determining region light chain 1 (CDR-L1) of SEQ ID NO: 985, CDR-L2 of SEQ ID NO: 1527, and CDR-L3 of SEQ ID NO: 2069. In some embodiments, the variable heavy chain comprises a polypeptide consensus sequence having at least 95% sequence identity to the amino acid sequence of SEQ ID NO: 172, and the variable light chain comprises a polypeptide consensus sequence having at least 95% sequence identity to the amino acid sequence of SEQ ID NO: 443. In some embodiments, the antibody or antigen binding fragment thereof binds a human WNT9B, mouse WNT9B, rat WNT9B, bovine WNT9B, or cynomolgus monkey WNT9B. In some embodiments, the human WNT9B comprises a sequence of SEQ ID NO: 4446.

[0270] Provided herein is an antibody that competes with an antibody or antigen binding fragment of any one of claims 682-685 for binding to WNT9B, wherein the antibody binds to human WNT9B or mouse WNT9B.

[0271] Provided herein is an antibody or an antigen binding fragment thereof that selectively binds to ubiquilin 2 (UBQLN2) or a variant thereof, comprising at least one of: a variable heavy chain region, wherein the variable heavy chain region comprises a complementarity-determining region heavy chain 1 (CDR-H1) of SEQ ID NO: 715, CDR-H2 of SEQ ID NO: 1257, and CDR-H3 of SEQ ID NO: 1799; and/or a variable light chain region, wherein the variable light chain region comprises a complementarity-determining region light chain 1 (CDR-L1) of SEQ ID NO: 986, CDR-L2 of SEQ ID NO: 1528, and CDR-L3 of SEQ ID NO: 2070. In some embodiments, the variable heavy chain comprises a polypeptide consensus sequence having at least 95% sequence identity to the amino acid sequence of SEQ ID NO: 173, and the variable light chain comprises a polypeptide consensus sequence having at least 95% sequence identity to the amino acid sequence of SEQ ID NO: 444. In some embodiments, the antibody or antigen binding fragment thereof binds a human UBQLN2, mouse UBQLN2, rat UBQLN2, bovine UBQLN2, or cynomolgus monkey UBQLN2. In some embodiments, the human UBQLN2 comprises a sequence of SEQ ID NO: 4447.

[0272] Provided herein is an antibody that competes with an antibody or antigen binding fragment of any one of claims 687-690 for binding to UBQLN2, wherein the antibody binds to human UBQLN2 or mouse UBQLN2.

[0273] Provided herein is an antibody or an antigen binding fragment thereof that selectively binds to ubiquilin 1, transcript variant 2 (UBQLN1) or a variant thereof, comprising at least one of: a variable heavy chain region, wherein the variable heavy chain region comprises a complementarity-determining region heavy chain 1 (CDR-H1) of SEQ ID NO: 715, CDR-H2 of SEQ ID NO: 1257, and CDR-H3 of SEQ ID NO: 1799; and/or a variable light chain region, wherein the variable light chain region comprises a complementarity-determining region light chain 1 (CDR-L1) of SEQ ID NO: 986, CDR-L2 of SEQ ID NO: 1528, and CDR-L3 of SEQ ID NO: 2070. In some embodiments, the variable heavy chain comprises a polypeptide consensus sequence having at least 95% sequence identity to the amino acid sequence of SEQ ID NO: 173, and the variable light chain comprises a polypeptide consensus sequence having at least 95% sequence identity to the amino acid sequence of SEQ ID NO: 444. In some embodiments, the antibody or antigen binding fragment thereof binds a human UBQLN1, mouse UBQLN1, rat UBQLN1, bovine UBQLN1, or cynomolgus monkey UBQLN1. In some embodiments, the human UBQLN1 comprises a sequence of SEQ ID NO: 4370.

[0274] Provided herein is an antibody that competes with an antibody or antigen binding fragment of any one of claims 692-695 for binding to UBQLN1, wherein the antibody binds to human UBQLN1 or mouse UBQLN1.

[0275] Provided herein is an antibody or an antigen binding fragment thereof that selectively binds to Ubiquilin 3 (UBQLN3) or a variant thereof, comprising at least one of: a variable heavy chain region, wherein the variable heavy chain region comprises a complementarity-determining region heavy chain 1 (CDR-H1) of SEQ ID NO: 715, CDR-H2 of SEQ ID NO: 1257, and CDR-H3 of SEQ ID NO: 1799; and/or a variable light chain region, wherein the variable light chain region comprises a complementarity-determining region light chain 1 (CDR-L1) of SEQ ID NO: 986, CDR-L2 of SEQ ID NO: 1528, and CDR-L3 of SEQ ID NO: 2070. In some embodiments, the variable heavy chain comprises a polypeptide consensus sequence having at least 95% sequence identity to the amino acid sequence of SEQ ID NO: 173, and the variable light chain comprises a polypeptide consensus sequence having at least 95% sequence identity to the amino acid sequence of SEQ ID NO: 444. In some embodiments, the antibody or antigen binding fragment thereof binds a human UBQLN3, mouse UBQLN3, rat UBQLN3, bovine UBQLN3, or cynomolgus monkey UBQLN3. In some embodiments, the human UBQLN3 comprises a sequence of SEQ ID NO: 4448.

[0276] Provided herein is an antibody that competes with an antibody or antigen binding fragment of any one of claims 697-700 for binding to UBQLN3, wherein the antibody binds to human UBQLN3 or mouse UBQLN3.

[0277] Provided herein is an antibody or an antigen binding fragment thereof that selectively binds to anterior gradient 3, protein disulphide isomerase family member (AGR3) or a variant thereof, comprising at least one of: a variable heavy chain region, wherein the variable heavy chain region comprises a complementarity-determining region heavy chain 1 (CDR-H1) of SEQ ID NO: 717, CDR-H2 of SEQ ID NO: 1259, and CDR-H3 of SEQ ID NO: 1801; and/or a variable light chain region, wherein the variable light chain region comprises a complementarity-determining region light chain 1 (CDR-L1) of SEQ ID NO: 988, CDR-L2 of SEQ ID NO: 1530, and CDR-L3 of SEQ ID NO: 2072. In some embodiments, the variable heavy chain comprises a polypeptide consensus sequence having at least 95% sequence identity to the amino acid sequence of SEQ ID NO: 175, and the variable light chain comprises a polypeptide consensus sequence having at least 95% sequence identity to the amino acid sequence of SEQ ID NO: 446. In some embodiments, the antibody or antigen binding fragment thereof binds a human AGR3, mouse AGR3, rat AGR3, bovine AGR3, or cynomolgus monkey AGR3. In some embodiments, the human AGR3 comprises a sequence of SEQ ID NO: 4449.

[0278] Provided herein is an antibody that competes with an antibody or antigen binding fragment of any one of claims 702-705 for binding to AGR3, wherein the antibody binds to human AGR3 or mouse AGR3.

[0279] Provided herein is an antibody or an antigen binding fragment thereof that selectively binds to serine and arginine rich splicing factor 3, transcript variant 1 (SRSF3) or a variant thereof, comprising at least one of: a variable heavy chain region, wherein the variable heavy chain region comprises a complementarity-determining region heavy chain 1 (CDR-H1) of SEQ ID NO: 719, CDR-H2 of SEQ ID NO: 1261, and CDR-H3 of SEQ ID NO: 1803; and/or a variable light chain region, wherein the variable light chain region comprises a complementarity-determining region light chain 1 (CDR-L1) of SEQ ID NO: 990, CDR-L2 of SEQ ID NO: 1532, and CDR-L3 of SEQ ID NO: 2074. In some embodiments, the variable heavy chain comprises a polypeptide consensus sequence having at least 95% sequence identity to the amino acid sequence of SEQ ID NO: 177, and the variable light chain comprises a polypeptide consensus sequence having at least 95% sequence identity to the amino acid sequence of SEQ ID NO: 448. In some embodiments, the antibody or antigen binding fragment thereof binds a human SRSF3, mouse SRSF3, rat SRSF3, bovine SRSF3, or cynomolgus monkey SRSF3. In some embodiments, the human SRSF3 comprises a sequence of SEQ ID NO: 4444.

[0280] Provided herein is an antibody that competes with an antibody or antigen binding fragment of any one of claims 707-710 for binding to SRSF3, wherein the antibody binds to human SRSF3 or mouse SRSF3.

[0281] Provided herein is an antibody or an antigen binding fragment thereof that selectively binds to baculoviral IAP repeat containing 7, transcript variant 1 (BIRC7) or a variant thereof, comprising at least one of: a variable heavy chain region, wherein the variable heavy chain region comprises a complementarity-determining region heavy chain 1 (CDR-H1) of SEQ ID NO: 720, CDR-H2 of SEQ ID NO: 1262, and CDR-H3 of SEQ ID NO: 1804; and/or a variable light chain region, wherein the variable light chain region comprises a complementarity-determining region light chain 1 (CDR-L1) of SEQ ID NO: 991, CDR-L2 of SEQ ID NO: 1533, and CDR-L3 of SEQ ID NO: 2075. In some embodiments, the variable heavy chain comprises a polypeptide consensus sequence having at least 95% sequence identity to the amino acid sequence of SEQ ID NO: 178, and the variable light chain comprises a polypeptide consensus sequence having at least 95% sequence identity to the amino acid sequence of SEQ ID NO: 449. In some embodiments, the antibody or antigen binding fragment thereof binds a human BIRC7, mouse BIRC7, rat BIRC7, bovine BIRC7, or cynomolgus monkey BIRC7. In some embodiments, the human BIRC7 comprises a sequence of SEQ ID NO: 4450.

[0282] Provided herein is an antibody that competes with an antibody or antigen binding fragment of any one of claims 712-715 for binding to BIRC7, wherein the antibody binds to human BIRC7 or mouse BIRC7.

[0283] Provided herein is an antibody or an antigen binding fragment thereof that selectively binds to endosome associated trafficking regulator 1, transcript variant 2 (SDCCAG3) or a variant thereof, comprising at least one of: a variable heavy chain region, wherein the variable heavy chain region comprises a complementarity-determining region heavy chain 1 (CDR-H1) of SEQ ID NO: 722, CDR-H2 of SEQ ID NO: 1264, and CDR-H3 of SEQ ID NO: 1806; and/or a variable light chain region, wherein the variable light chain region comprises a complementarity-determining region light chain 1 (CDR-L1) of SEQ ID NO: 993, CDR-L2 of SEQ ID NO: 1535, and CDR-L3 of SEQ ID NO: 2077. In some embodiments, the variable heavy chain comprises a polypeptide consensus sequence having at least 95% sequence identity to the amino acid sequence of SEQ ID NO: 180, and the variable light chain comprises a polypeptide consensus sequence having at least 95% sequence identity to the amino acid sequence of SEQ ID NO: 451. In some embodiments, the antibody or antigen binding fragment thereof binds a human SDCCAG3, mouse SDCCAG3, rat SDCCAG3, bovine SDCCAG3, or cynomolgus monkey SDCCAG3. In some embodiments, the human SDCCAG3 comprises a sequence of SEQ ID NO: 4373.

[0284] Provided herein is an antibody that competes with an antibody or antigen binding fragment of any one of claims 717-720 for binding to SDCCAG3, wherein the antibody binds to human SDCCAG3 or mouse SDCCAG3.

[0285] Provided herein is an antibody or an antigen binding fragment thereof that selectively binds to microtubule associated scaffold protein 2, transcript variant 2 (MTUS2) or a variant thereof, comprising at least one of: a variable heavy chain region, wherein the variable heavy chain region comprises a complementarity-determining region heavy chain 1 (CDR-H1) of SEQ ID NO: 724, CDR-H2 of SEQ ID NO: 1266, and CDR-H3 of SEQ ID NO: 1808; and/or a variable light chain region, wherein the variable light chain region comprises a complementarity-determining region light chain 1 (CDR-L1) of SEQ ID NO: 995, CDR-L2 of SEQ ID NO: 1537, and CDR-L3 of SEQ ID NO: 2079. In some embodiments, the variable heavy chain comprises a polypeptide consensus sequence having at least 95% sequence identity to the amino acid sequence of SEQ ID NO: 182, and the variable light chain comprises a polypeptide consensus sequence having at least 95% sequence identity to the amino acid sequence of SEQ ID NO: 453. In some embodiments, the antibody or antigen binding fragment thereof binds a human MTUS2, mouse MTUS2, rat MTUS2, bovine MTUS2, or cynomolgus monkey MTUS2. In some embodiments, the human MTUS2 comprises a sequence of SEQ ID NO: 4451.

[0286] Provided herein is an antibody that competes with an antibody or antigen binding fragment of any one of claims 722-725 for binding to MTUS2, wherein the antibody binds to human MTUS2 or mouse MTUS2.

[0287] Provided herein is an antibody or an antigen binding fragment thereof that selectively binds to zinc finger protein 296 (ZNF296) or a variant thereof, comprising at least one of: a variable heavy chain region, wherein the variable heavy chain region comprises a complementarity-determining region heavy chain 1 (CDR-H1) of SEQ ID NO: 725, CDR-H2 of SEQ ID NO: 1267, and CDR-H3 of SEQ ID NO: 1809; and/or a variable light chain region, wherein the variable light chain region comprises a complementarity-determining region light chain 1 (CDR-L1) of SEQ ID NO: 996, CDR-L2 of SEQ ID NO: 1538, and CDR-L3 of SEQ ID NO: 2080. In some embodiments, the variable heavy chain comprises a polypeptide consensus sequence having at least 95% sequence identity to the amino acid sequence of SEQ ID NO: 183, and the variable light chain comprises a polypeptide consensus sequence having at least 95% sequence identity to the amino acid sequence of SEQ ID NO: 454. In some embodiments, the antibody or antigen binding fragment thereof binds a human ZNF296, mouse ZNF296, rat ZNF296, bovine ZNF296, or cynomolgus monkey ZNF296. In some embodiments, the human ZNF296 comprises a sequence of SEQ ID NO: 4452.

[0288] Provided herein is an antibody that competes with an antibody or antigen binding fragment of any one of claims 727-730 for binding to ZNF296, wherein the antibody binds to human ZNF296 or mouse ZNF296.

[0289] Provided herein is an antibody or an antigen binding fragment thereof that selectively binds to phosphodiesterase 5A, transcript variant 1 (PDE5A) or a variant thereof, comprising at least one of: a variable heavy chain region, wherein the variable heavy chain region comprises a complementarity-determining region heavy chain 1 (CDR-H1) of SEQ ID NO: 725, CDR-H2 of SEQ ID NO: 1267, and CDR-H3 of SEQ ID NO: 1809; and/or a variable light chain region, wherein the variable light chain region comprises a complementarity-determining region light chain 1 (CDR-L1) of SEQ ID NO: 996, CDR-L2 of SEQ ID NO: 1538, and CDR-L3 of SEQ ID NO: 2080. In some embodiments, the variable heavy chain comprises a polypeptide consensus sequence having at least 95% sequence identity to the amino acid sequence of SEQ ID NO: 183, and the variable light chain comprises a polypeptide consensus sequence having at least 95% sequence identity to the amino acid sequence of SEQ ID NO: 454. In some embodiments, the antibody or antigen binding fragment thereof binds a human PDE5A, mouse PDE5A, rat PDE5A, bovine PDE5A, or cynomolgus monkey PDE5A. In some embodiments, the human PDE5A comprises a sequence of SEQ ID NO: 4453.

[0290] Provided herein is an antibody that competes with an antibody or antigen binding fragment of any one of claims 732-735 for binding to PDE5A, wherein the antibody binds to human PDE5A or mouse PDE5A.

[0291] Provided herein is an antibody or an antigen binding fragment thereof that selectively binds to Ep400 pseudogene 1 (EP400NL) or a variant thereof, comprising at least one of: a variable heavy chain region, wherein the variable heavy chain region comprises a complementarity-determining region heavy chain 1 (CDR-H1) of SEQ ID NO: 725, CDR-H2 of SEQ ID NO: 1267, and CDR-H3 of SEQ ID NO: 1809; and/or a variable light chain region, wherein the variable light chain region comprises a complementarity-determining region light chain 1 (CDR-L1) of SEQ ID NO: 996, CDR-L2 of SEQ ID NO: 1538, and CDR-L3 of SEQ ID NO: 2080. In some embodiments, the variable heavy chain comprises a polypeptide consensus sequence having at least 95% sequence identity to the amino acid sequence of SEQ ID NO: 183, and the variable light chain comprises a polypeptide consensus sequence having at least 95% sequence identity to the amino acid sequence of SEQ ID NO: 454. In some embodiments, the antibody or antigen binding fragment thereof binds a human EP400NL, mouse EP400NL, rat EP400NL, bovine EP400NL, or cynomolgus monkey EP400NL. In some embodiments, the human EP400NL comprises a sequence of SEQ ID NO: 4454.

[0292] Provided herein is an antibody that competes with an antibody or antigen binding fragment of any one of claims 737-740 for binding to EP400NL, wherein the antibody binds to human EP400NL or mouse EP400NL.

[0293] Provided herein is an antibody or an antigen binding fragment thereof that selectively binds to Bcl2 like 1 (BCL2L1) or a variant thereof, comprising at least one of: a variable heavy chain region, wherein the variable heavy chain region comprises a complementarity-determining region heavy chain 1 (CDR-H1) of SEQ ID NO: 727, CDR-H2 of SEQ ID NO: 1269, and CDR-H3 of SEQ ID NO: 1811; and/or a variable light chain region, wherein the variable light chain region comprises a complementarity-determining region light chain 1 (CDR-L1) of SEQ ID NO: 998, CDR-L2 of SEQ ID NO: 1540, and CDR-L3 of SEQ ID NO: 2082. In some embodiments, the variable heavy chain comprises a polypeptide consensus sequence having at least 95% sequence identity to the amino acid sequence of SEQ ID NO: 185, and the variable light chain comprises a polypeptide consensus sequence having at least 95% sequence identity to the amino acid sequence of SEQ ID NO: 456. In some embodiments, the antibody or antigen binding fragment thereof binds a human BCL2L1, mouse BCL2L1, rat BCL2L1, bovine BCL2L1, or cynomolgus monkey BCL2L1. In some embodiments, the human BCL2L1 comprises a sequence of SEQ ID NO: 4455.

[0294] Provided herein is an antibody that competes with an antibody or antigen binding fragment of any one of claims 742-745 for binding to BCL2L1, wherein the antibody binds to human BCL2L1 or mouse BCL2L1.

[0295] Provided herein is an antibody or an antigen binding fragment thereof that selectively binds to arginine and glutamate rich 1 (ARGLU1) or a variant thereof, comprising at least one of: a variable heavy chain region, wherein the variable heavy chain region comprises a complementarity-determining region heavy chain 1 (CDR-H1) of SEQ ID NO: 728, CDR-H2 of SEQ ID NO: 1270, and CDR-H3 of SEQ ID NO: 1812; and/or a variable light chain region, wherein the variable light chain region comprises a complementarity-determining region light chain 1 (CDR-L1) of SEQ ID NO: 999, CDR-L2 of SEQ ID NO: 1541, and CDR-L3 of SEQ ID NO: 2083. In some embodiments, the variable heavy chain comprises a polypeptide consensus sequence having at least 95% sequence identity to the amino acid sequence of SEQ ID NO: 186, and the variable light chain comprises a polypeptide consensus sequence having at least 95% sequence identity to the amino acid sequence of SEQ ID NO: 457. In some embodiments, the antibody or antigen binding fragment thereof binds a human ARGLU1, mouse ARGLU1, rat ARGLU1, bovine ARGLU1, or cynomolgus monkey ARGLU1. In some embodiments, the human ARGLU1 comprises a sequence of SEQ ID NO: 4456.

[0296] Provided herein is an antibody that competes with an antibody or antigen binding fragment of any one of claims 747-750 for binding to ARGLU1, wherein the antibody binds to human ARGLU1 or mouse ARGLU1.

[0297] Provided herein is an antibody or an antigen binding fragment thereof that selectively binds to SAS-6 centriolar assembly protein, transcript variant 2 (SASS6) or a variant thereof, comprising at least one of: a variable heavy chain region, wherein the variable heavy chain region comprises a complementarity-determining region heavy chain 1 (CDR-H1) of SEQ ID NO: 728, CDR-H2 of SEQ ID NO: 1270, and CDR-H3 of SEQ ID NO: 1812; and/or a variable light chain region, wherein the variable light chain region comprises a complementarity-determining region light chain 1 (CDR-L1) of SEQ ID NO: 999, CDR-L2 of SEQ ID NO: 1541, and CDR-L3 of SEQ ID NO: 2083. In some embodiments, the variable heavy chain comprises a polypeptide consensus sequence having at least 95% sequence identity to the amino acid sequence of SEQ ID NO: 186, and the variable light chain comprises a polypeptide consensus sequence having at least 95% sequence identity to the amino acid sequence of SEQ ID NO: 457. In some embodiments, the antibody or antigen binding fragment thereof binds a human SASS6, mouse SASS6, rat SASS6, bovine SASS6, or cynomolgus monkey SASS6. In some embodiments, the human SASS6 comprises a sequence of SEQ ID NO: 4457.

[0298] Provided herein is an antibody that competes with an antibody or antigen binding fragment of any one of claims 752-755 for binding to SASS6, wherein the antibody binds to human SASS6 or mouse SASS6.

[0299] Provided herein is an antibody or an antigen binding fragment thereof that selectively binds to proteasome 26S subunit, non-ATPase 4, transcript variant 2 (PSMD4) or a variant thereof, comprising at least one of: a variable heavy chain region, wherein the variable heavy chain region comprises a complementarity-determining region heavy chain 1 (CDR-H1) of SEQ ID NO: 729, CDR-H2 of SEQ ID NO: 1271, and CDR-H3 of SEQ ID NO: 1813; and/or a variable light chain region, wherein the variable light chain region comprises a complementarity-determining region light chain 1 (CDR-L1) of SEQ ID NO: 1000, CDR-L2 of SEQ ID NO: 1542, and CDR-L3 of SEQ ID NO: 2084. In some embodiments, the variable heavy chain comprises a polypeptide consensus sequence having at least 95% sequence identity to the amino acid sequence of SEQ ID NO: 187, and the variable light chain comprises a polypeptide consensus sequence having at least 95% sequence identity to the amino acid sequence of SEQ ID NO: 458. In some embodiments, the antibody or antigen binding fragment thereof binds a human PSMD4, mouse PSMD4, rat PSMD4, bovine PSMD4, or cynomolgus monkey PSMD4. In some embodiments, the human PSMD4 comprises a sequence of SEQ ID NO: 4458.

[0300] Provided herein is an antibody that competes with an antibody or antigen binding fragment of any one of claims 757-760 for binding to PSMD4, wherein the antibody binds to human PSMD4 or mouse PSMD4.

[0301] Provided herein is an antibody or an antigen binding fragment thereof that selectively binds to Src like adaptor, transcript variant 1 (SLA) or a variant thereof, comprising at least one of: a variable heavy chain region, wherein the variable heavy chain region comprises a complementarity-determining region heavy chain 1 (CDR-H1) of SEQ ID NO: 729, CDR-H2 of SEQ ID NO: 1271, and CDR-H3 of SEQ ID NO: 1813; and/or a variable light chain region, wherein the variable light chain region comprises a complementarity-determining region light chain 1 (CDR-L1) of SEQ ID NO: 1000, CDR-L2 of SEQ ID NO: 1542, and CDR-L3 of SEQ ID NO: 2084. In some embodiments, the variable heavy chain comprises a polypeptide consensus sequence having at least 95% sequence identity to the amino acid sequence of SEQ ID NO: 187, and the variable light chain comprises a polypeptide consensus sequence having at least 95% sequence identity to the amino acid sequence of SEQ ID NO: 458. In some embodiments, the antibody or antigen binding fragment thereof binds a human SLA, mouse SLA, rat SLA, bovine SLA, or cynomolgus monkey SLA. In some embodiments, the human SLA comprises a sequence of SEQ ID NO: 4459.

[0302] Provided herein is an antibody that competes with an antibody or antigen binding fragment of any one of claims 762-765 for binding to SLA, wherein the antibody binds to human SLA or mouse SLA.

[0303] Provided herein is an antibody or an antigen binding fragment thereof that selectively binds to nudix hydrolase 21 (NUDT21) or a variant thereof, comprising at least one of: a variable heavy chain region, wherein the variable heavy chain region comprises a complementarity-determining region heavy chain 1 (CDR-H1) of SEQ ID NO: 730, CDR-H2 of SEQ ID NO: 1272, and CDR-H3 of SEQ ID NO: 1814; and/or a variable light chain region, wherein the variable light chain region comprises a complementarity-determining region light chain 1 (CDR-L1) of SEQ ID NO: 1001, CDR-L2 of SEQ ID NO: 1543, and CDR-L3 of SEQ ID NO: 2085. In some embodiments, the variable heavy chain comprises a polypeptide consensus sequence having at least 95% sequence identity to the amino acid sequence of SEQ ID NO: 188, and the variable light chain comprises a polypeptide consensus sequence having at least 95% sequence identity to the amino acid sequence of SEQ ID NO: 459. In some embodiments, the antibody or antigen binding fragment thereof binds a human NUDT21, mouse NUDT21, rat NUDT21, bovine NUDT21, or cynomolgus monkey NUDT21. In some embodiments, the human NUDT21 comprises a sequence of SEQ ID NO: 4460.

[0304] Provided herein is an antibody that competes with an antibody or antigen binding fragment of any one of claims 767-770 for binding to NUDT21, wherein the antibody binds to human NUDT21 or mouse NUDT21.

[0305] Provided herein is an antibody or an antigen binding fragment thereof that selectively binds to zinc finger protein 431, transcript variant 2 (ZNF431) or a variant thereof, comprising at least one of: a variable heavy chain region, wherein the variable heavy chain region comprises a complementarity-determining region heavy chain 1 (CDR-H1) of SEQ ID NO: 730, CDR-H2 of SEQ ID NO: 1272, and CDR-H3 of SEQ ID NO: 1814; and/or a variable light chain region, wherein the variable light chain region comprises a complementarity-determining region light chain 1 (CDR-L1) of SEQ ID NO: 1001, CDR-L2 of SEQ ID NO: 1543, and CDR-L3 of SEQ ID NO: 2085. In some embodiments, the variable heavy chain comprises a polypeptide consensus sequence having at least 95% sequence identity to the amino acid sequence of SEQ ID NO: 188, and the variable light chain comprises a polypeptide consensus sequence having at least 95% sequence identity to the amino acid sequence of SEQ ID NO: 459. In some embodiments, the antibody or antigen binding fragment thereof binds a human ZNF431, mouse ZNF431, rat ZNF431, bovine ZNF431, or cynomolgus monkey ZNF431. In some embodiments, the human ZNF431 comprises a sequence of SEQ ID NO: 4461.

[0306] Provided herein is an antibody that competes with an antibody or antigen binding fragment of any one of claims 772-775 for binding to ZNF431, wherein the antibody binds to human ZNF431 or mouse ZNF431.

[0307] Provided herein is an antibody or an antigen binding fragment thereof that selectively binds to Zinc finger protein 699 (ZNF699) or a variant thereof, comprising at least one of: a variable heavy chain region, wherein the variable heavy chain region comprises a complementarity-determining region heavy chain 1 (CDR-H1) of SEQ ID NO: 730, CDR-H2 of SEQ ID NO: 1272, and CDR-H3 of SEQ ID NO: 1814; and/or a variable light chain region, wherein the variable light chain region comprises a complementarity-determining region light chain 1 (CDR-L1) of SEQ ID NO: 1001, CDR-L2 of SEQ ID NO: 1543, and CDR-L3 of SEQ ID NO: 2085. In some embodiments, the variable heavy chain comprises a polypeptide consensus sequence having at least 95% sequence identity to the amino acid sequence of SEQ ID NO: 188, and the variable light chain comprises a polypeptide consensus sequence having at least 95% sequence identity to the amino acid sequence of SEQ ID NO: 459. In some embodiments, the antibody or antigen binding fragment thereof binds a human ZNF699, mouse ZNF699, rat ZNF699, bovine ZNF699, or cynomolgus monkey ZNF699. In some embodiments, the human ZNF699 comprises a sequence of SEQ ID NO: 4462.

[0308] Provided herein is an antibody that competes with an antibody or antigen binding fragment of any one of claims 777-780 for binding to ZNF699, wherein the antibody binds to human ZNF699 or mouse ZNF699.

[0309] Provided herein is an antibody or an antigen binding fragment thereof that selectively binds to quinoid dihydropteridine reductase, transcript variant 1 (QDPR) or a variant thereof, comprising at least one of: a variable heavy chain region, wherein the variable heavy chain region comprises a complementarity-determining region heavy chain 1 (CDR-H1) of SEQ ID NO: 731, CDR-H2 of SEQ ID NO: 1273, and CDR-H3 of SEQ ID NO: 1815; and/or a variable light chain region, wherein the variable light chain region comprises a complementarity-determining region light chain 1 (CDR-L1) of SEQ ID NO: 1002, CDR-L2 of SEQ ID NO: 1544, and CDR-L3 of SEQ ID NO: 2086. In some embodiments, the variable heavy chain comprises a polypeptide consensus sequence having at least 95% sequence identity to the amino acid sequence of SEQ ID NO: 189, and the variable light chain comprises a polypeptide consensus sequence having at least 95% sequence identity to the amino acid sequence of SEQ ID NO: 460. In some embodiments, the antibody or antigen binding fragment thereof binds a human QDPR, mouse QDPR, rat QDPR, bovine QDPR, or cynomolgus monkey QDPR. In some embodiments, the human QDPR comprises a sequence of SEQ ID NO: 4438.

[0310] Provided herein is an antibody that competes with an antibody or antigen binding fragment of any one of claims 782-785 for binding to QDPR, wherein the antibody binds to human QDPR or mouse QDPR.

[0311] Provided herein is an antibody or an antigen binding fragment thereof that selectively binds to PAGE family member 2 (PAGE2) or a variant thereof, comprising at least one of:
[0312] a variable heavy chain region, wherein the variable heavy chain region comprises a complementarity-determining region heavy chain 1 (CDR-H1) of SEQ ID NO: 732, CDR-H2 of SEQ ID NO: 1274, and CDR-H3 of SEQ ID NO: 1816; and/or a variable light chain region, wherein the variable light chain region comprises a complementarity-determining region light chain 1 (CDR-L1) of SEQ ID NO: 1003, CDR-L2 of SEQ ID NO: 1545, and CDR-L3 of SEQ ID NO: 2087. In some embodiments, the variable heavy chain comprises a polypeptide consensus sequence having at least 95% sequence identity to the amino acid sequence of SEQ ID NO: 190, and the variable light chain comprises a polypeptide consensus sequence having at least 95% sequence identity to the amino acid sequence of SEQ ID NO: 461. In some embodiments, the antibody or antigen binding fragment thereof binds a human PAGE2, mouse PAGE2, rat PAGE2, bovine PAGE2, or cynomolgus monkey PAGE2. In some embodiments, the human PAGE2 comprises a sequence of SEQ ID NO: 4463.

[0313] Provided herein is an antibody that competes with an antibody or antigen binding fragment of any one of claims 787-790 for binding to PAGE2, wherein the antibody binds to human PAGE2 or mouse PAGE2.

[0314] Provided herein is an antibody or an antigen binding fragment thereof that selectively binds to keratin associated protein 12-3 (KRTAP12-3) or a variant thereof, comprising at least one of: a variable heavy chain region, wherein the variable heavy chain region comprises a complementarity-determining region heavy chain 1 (CDR-H1) of SEQ ID NO: 732, CDR-H2 of SEQ ID NO: 1274, and CDR-H3 of SEQ ID NO: 1816; and/or a variable light chain region, wherein the variable light chain region comprises a complementarity-determining region light chain 1 (CDR-L1) of SEQ ID NO: 1003, CDR-L2 of SEQ ID NO: 1545, and CDR-L3 of SEQ ID NO: 2087. In some embodiments, the variable heavy chain comprises a polypeptide consensus sequence having at least 95% sequence identity to the amino acid sequence of SEQ ID NO: 190, and the variable light chain comprises a polypeptide consensus sequence having at least 95% sequence identity to the amino acid sequence of SEQ ID NO: 461. In some embodiments, the antibody or antigen binding fragment thereof binds a human KRTAP12-3, mouse KRTAP12-3, rat KRTAP12-3, bovine KRTAP12-3, or cynomolgus monkey KRTAP12-3. In some embodiments, the human KRTAP12-3 comprises a sequence of SEQ ID NO: 4464.

[0315] Provided herein is an antibody that competes with an antibody or antigen binding fragment of any one of claims 792-795 for binding to KRTAP12-3, wherein the antibody binds to human KRTAP12-3 or mouse KRTAP12-3.

[0316] Provided herein is an antibody or an antigen binding fragment thereof that selectively binds to enolase 2 (ENO2) or a variant thereof, comprising at least one of: a variable heavy chain region, wherein the variable heavy chain region comprises a complementarity-determining region heavy chain 1 (CDR-H1) of SEQ ID NO: 734, CDR-H2 of SEQ ID NO: 1276, and CDR-H3 of SEQ ID NO: 1818; and/or a variable light chain region, wherein the variable light chain region comprises a complementarity-determining region light chain 1 (CDR-L1) of SEQ ID NO: 1005, CDR-L2 of SEQ ID NO: 1547, and CDR-L3 of SEQ ID NO: 2089. In some embodiments, the variable heavy chain comprises a polypeptide consensus sequence having at least 95% sequence identity to the amino acid sequence of SEQ ID NO: 192, and the variable light chain comprises a polypeptide consensus sequence having at least 95% sequence identity to the amino acid sequence of SEQ ID NO: 463. In some embodiments, the antibody or antigen binding fragment thereof binds a human ENO2, mouse ENO2, rat ENO2, bovine ENO2, or cynomolgus monkey ENO2. In some embodiments, the human ENO2 comprises a sequence of SEQ ID NO: 4465.

[0317] Provided herein is an antibody that competes with an antibody or antigen binding fragment of any one of claims 797-800 for binding to ENO2, wherein the antibody binds to human ENO2 or mouse ENO2.

[0318] Provided herein is an antibody or an antigen binding fragment thereof that selectively binds to chromosome 11 open reading frame 68, transcript variant 1 (C11orf68) or a variant thereof, comprising at least one of: a variable heavy chain region, wherein the variable heavy chain region comprises a complementarity-determining region heavy chain 1 (CDR-H1) of SEQ ID NO: 734, CDR-H2 of SEQ ID NO: 1276, and CDR-H3 of SEQ ID NO: 1818; and/or a variable light chain region, wherein the variable light chain region comprises a complementarity-determining region light chain 1 (CDR-L1) of SEQ ID NO: 1005, CDR-L2 of SEQ ID NO: 1547, and CDR-L3 of SEQ ID NO: 2089. In some embodiments, the variable heavy chain comprises a polypeptide consensus sequence having at least 95% sequence identity to the amino acid sequence of SEQ ID NO: 192, and the variable light chain comprises a polypeptide consensus sequence having at least 95% sequence identity to the amino acid sequence of SEQ ID NO: 463. In some embodiments, the antibody or antigen binding fragment thereof binds a human C11orf68, mouse C11orf68, rat C11orf68, bovine C11orf68, or cynomolgus monkey C11orf68. In some embodiments, the human C11orf68 comprises a sequence of SEQ ID NO: 4466.

[0319] Provided herein is an antibody that competes with an antibody or antigen binding fragment of any one of claims 802-805 for binding to C11orf68, wherein the antibody binds to human C11orf68 or mouse C11orf68.

[0320] Provided herein is an antibody or an antigen binding fragment thereof that selectively binds to methionyl-tRNA synthetase 1 (MARS) or a variant thereof, comprising at least one of: a variable heavy chain region, wherein the variable heavy chain region comprises a complementarity-determining region heavy chain 1 (CDR-H1) of SEQ ID NO: 735, CDR-H2 of SEQ ID NO: 1277, and CDR-H3 of SEQ ID NO: 1819; and/or a variable light chain region, wherein the variable light chain region comprises a complementarity-determining region light chain 1 (CDR-L1) of SEQ ID NO: 1006, CDR-L2 of SEQ ID NO: 1548, and CDR-L3 of SEQ ID NO: 2090. In some embodiments, the variable heavy chain comprises a polypeptide consensus sequence having at least 95% sequence identity to the amino acid sequence of SEQ ID NO: 193, and the variable light chain comprises a polypeptide consensus sequence having at least 95% sequence identity to the amino acid sequence of SEQ ID NO: 464. In some embodiments, the antibody or antigen binding fragment thereof binds a human MARS, mouse MARS, rat MARS, bovine MARS, or cynomolgus monkey MARS. In some embodiments, the human MARS comprises a sequence of SEQ ID NO: 4467.

[0321] Provided herein is an antibody that competes with an antibody or antigen binding fragment of any one of claims 807-810 for binding to MARS, wherein the antibody binds to human MARS or mouse MARS.

[0322] Provided herein is an antibody or an antigen binding fragment thereof that selectively binds to serpin family B member 6, transcript variant 2 (SERPINB6) or a variant thereof, comprising at least one of: a variable heavy chain region, wherein the variable heavy chain region comprises a complementarity-determining region heavy chain 1 (CDR-H1) of SEQ ID NO: 737, CDR-H2 of SEQ ID NO: 1279, and CDR-H3 of SEQ ID NO: 1821; and/or a variable light chain region, wherein the variable light chain region comprises a complementarity-determining region light chain 1 (CDR-L1) of SEQ ID NO: 1008, CDR-L2 of SEQ ID NO: 1550, and CDR-L3 of SEQ ID NO: 2092. In some embodiments, the variable heavy chain comprises a polypeptide consensus sequence having at least 95% sequence identity to the amino acid sequence of SEQ ID NO: 195, and the variable light chain comprises a polypeptide consensus sequence having at least 95% sequence identity to the amino acid sequence of SEQ ID NO: 466. In some embodiments, the antibody or antigen binding fragment thereof binds a human SERPINB6, mouse SERPINB6, rat SERPINB6, bovine SERPINB6, or cynomolgus monkey SERPINB6. In some embodiments, the human SERPINB6 comprises a sequence of SEQ ID NO: 4468.

[0323] Provided herein is an antibody that competes with an antibody or antigen binding fragment of any one of claims 812-815 for binding to SERPINB6, wherein the antibody binds to human SERPINB6 or mouse SERPINB6.

[0324] Provided herein is an antibody or an antigen binding fragment thereof that selectively binds to endoplasmic reticulum protein 27, transcript variant 1 (ERP27) or a variant thereof, comprising at least one of: a variable heavy chain region, wherein the variable heavy chain region comprises a complementarity-determining region heavy chain 1 (CDR-H1) of SEQ ID NO: 738, CDR-H2 of SEQ ID NO: 1280, and CDR-H3 of SEQ ID NO: 1822; and/or a variable light chain region, wherein the variable light chain region comprises a complementarity-determining region light chain 1 (CDR-L1) of SEQ ID NO: 1009, CDR-L2 of SEQ ID NO: 1551, and CDR-L3 of SEQ ID NO: 2093. In some embodiments, the variable heavy chain comprises a polypeptide consensus sequence having at least 95% sequence identity to the amino acid sequence of SEQ ID NO: 196, and the variable light chain comprises a polypeptide consensus sequence having at least 95% sequence identity to the amino acid sequence of SEQ ID NO: 467. In some embodiments, the antibody or antigen binding fragment thereof binds a human ERP27, mouse ERP27, rat ERP27, bovine ERP27, or cynomolgus monkey ERP27. In some embodiments, the human ERP27 comprises a sequence of SEQ ID NO: 4469.

[0325] Provided herein is an antibody that competes with an antibody or antigen binding fragment of any one of claims 817-820 for binding to ERP27, wherein the antibody binds to human ERP27 or mouse ERP27.

[0326] Provided herein is an antibody or an antigen binding fragment thereof that selectively binds to Dpy-30 histone methyltransferase complex regulatory subunit (DPY30) or a variant thereof, comprising at least one of:
[0327] a variable heavy chain region, wherein the variable heavy chain region comprises a complementarity-determining region heavy chain 1 (CDR-H1) of SEQ ID NO: 738, CDR-H2 of SEQ ID NO: 1280, and CDR-H3 of SEQ ID NO: 1822; and/or a variable light chain region, wherein the variable light chain region comprises a complementarity-determining region light chain 1 (CDR-L1) of SEQ ID NO: 1009, CDR-L2 of SEQ ID NO: 1551, and CDR-L3 of SEQ ID NO: 2093. In some embodiments, the variable heavy chain comprises a polypeptide consensus sequence having at least 95% sequence identity to the amino acid sequence of SEQ ID NO: 196, and the variable light chain comprises a polypeptide consensus sequence having at least 95% sequence identity to the amino acid sequence of SEQ ID NO: 467. In some embodiments, the antibody or antigen binding fragment thereof binds a human DPY30, mouse DPY30, rat DPY30, bovine DPY30, or cynomolgus monkey DPY30. In some embodiments, the human DPY30 comprises a sequence of SEQ ID NO: 4470.

[0328] Provided herein is an antibody that competes with an antibody or antigen binding fragment of any one of claims 822-825 for binding to DPY30, wherein the antibody binds to human DPY30 or mouse DPY30.

[0329] Provided herein is an antibody or an antigen binding fragment thereof that selectively binds to rhophilin associated tail protein 1 like, transcript variant 2 (ROPN1L) or a variant thereof, comprising at least one of: a variable heavy chain region, wherein the variable heavy chain region comprises a complementarity-determining region heavy chain 1 (CDR-H1) of SEQ ID NO: 738, CDR-H2 of SEQ ID NO: 1280, and CDR-H3 of SEQ ID NO: 1822; and/or a variable light chain region, wherein the variable light chain region comprises a complementarity-determining region light chain 1 (CDR-L1) of SEQ ID NO: 1009, CDR-L2 of SEQ ID NO: 1551, and CDR-L3 of SEQ ID NO: 2093. In some embodiments, the variable heavy chain comprises a polypeptide consensus sequence having at least 95% sequence identity to the amino acid sequence of SEQ ID NO: 196, and the variable light chain comprises a polypeptide consensus sequence having at least 95% sequence identity to the amino acid sequence of SEQ ID NO: 467. In some embodiments, the antibody or antigen binding fragment thereof binds a human ROPN1L, mouse ROPN1L, rat ROPN1L, bovine ROPN1L, or cynomolgus monkey ROPN1L. In some embodiments, the human ROPN1L comprises a sequence of SEQ ID NO: 4471.

[0330] Provided herein is an antibody that competes with an antibody or antigen binding fragment of any one of claims 827-830 for binding to ROPN1L, wherein the antibody binds to human ROPN1L or mouse ROPN1L.

[0331] Provided herein is an antibody or an antigen binding fragment thereof that selectively binds to endosome associated trafficking regulator 1, transcript variant 2 (SDCCAG3) or a variant thereof, comprising at least one of: a variable heavy chain region, wherein the variable heavy chain region comprises a complementarity-determining region heavy chain 1 (CDR-H1) of SEQ ID NO: 739, CDR-H2 of SEQ ID NO: 1281, and CDR-H3 of SEQ ID NO: 1823; and/or a variable light chain region, wherein the variable light chain region comprises a complementarity-determining region light chain 1 (CDR-L1) of SEQ ID NO: 1010, CDR-L2 of SEQ ID NO: 1552, and CDR-L3 of SEQ ID NO: 2094. In some embodiments, the variable heavy chain comprises a polypeptide consensus sequence having at least 95% sequence identity to the amino acid sequence of SEQ ID NO: 197, and the variable light chain comprises a polypeptide consensus sequence having at least 95% sequence identity to the amino acid sequence of SEQ ID NO: 468. In some embodiments, the antibody or antigen binding fragment thereof binds a human SDCCAG3, mouse SDCCAG3, rat SDCCAG3, bovine SDCCAG3, or cynomolgus monkey SDCCAG3. In some embodiments, the human SDCCAG3 comprises a sequence of SEQ ID NO: 4373.

[0332] Provided herein is an antibody that competes with an antibody or antigen binding fragment of any one of claims 832-835 for binding to SDCCAG3, wherein the antibody binds to human SDCCAG3 or mouse SDCCAG3.

[0333] Provided herein is an antibody or an antigen binding fragment thereof that selectively binds to Jupiter microtubule associated homolog 2 (HN1L) or a variant thereof, comprising at least one of: a variable heavy chain region, wherein the variable heavy chain region comprises a complementarity-determining region heavy chain 1 (CDR-H1) of SEQ ID NO: 740, CDR-H2 of SEQ ID NO: 1282, and CDR-H3 of SEQ ID NO: 1824; and/or a variable light chain region, wherein the variable light chain region comprises a complementarity-determining region light chain 1 (CDR-L1) of SEQ ID NO: 1011, CDR-L2 of SEQ ID NO: 1553, and CDR-L3 of SEQ ID NO: 2095. In some embodiments, the variable heavy chain comprises a polypeptide consensus sequence having at least 95% sequence identity to the amino acid sequence of SEQ ID NO: 198, and the variable light chain comprises a polypeptide consensus sequence having at least 95% sequence identity to the amino acid sequence of SEQ ID NO: 469. In some embodiments, the antibody or antigen binding fragment thereof binds a human HN1L, mouse HN1L, rat HN1L, bovine HN1L, or cynomolgus monkey HN1L. In some embodiments, the human HN1L comprises a sequence of SEQ ID NO: 4395.

[0334] Provided herein is an antibody that competes with an antibody or antigen binding fragment of any one of claims 837-840 for binding to HN1L, wherein the antibody binds to human HN1L or mouse HN1L.

[0335] Provided herein is an antibody or an antigen binding fragment thereof that selectively binds to BTB domain containing 8 (BTBD8) or a variant thereof, comprising at least one of: a variable heavy chain region, wherein the variable heavy chain region comprises a complementarity-determining region heavy chain 1 (CDR-H1) of SEQ ID NO: 740, CDR-H2 of SEQ ID NO: 1282, and CDR-H3 of SEQ ID NO: 1824; and/or a variable light chain region, wherein the variable light chain region comprises a complementarity-determining region light chain 1 (CDR-L1) of SEQ ID NO: 1011, CDR-L2 of SEQ ID NO: 1553, and CDR-L3 of SEQ ID NO: 2095. In some embodiments, the variable heavy chain comprises a polypeptide consensus sequence having at least 95% sequence identity to the amino acid sequence of SEQ ID NO: 198, and the variable light chain comprises a polypeptide consensus sequence having at least 95% sequence identity to the amino acid sequence of SEQ ID NO: 469. In some embodiments, the antibody or antigen binding fragment thereof binds a human BTBD8, mouse BTBD8, rat BTBD8, bovine BTBD8, or cynomolgus monkey BTBD8. In some embodiments, the human BTBD8 comprises a sequence of SEQ ID NO: 4472.

[0336] Provided herein is an antibody that competes with an antibody or antigen binding fragment of any one of claims 842-845 for binding to BTBD8, wherein the antibody binds to human BTBD8 or mouse BTBD8.

[0337] Provided herein is an antibody or an antigen binding fragment thereof that selectively binds to neutrophil cytosolic factor 4, transcript variant 2 (NCF4) or a variant thereof, comprising at least one of: a variable heavy chain region, wherein the variable heavy chain region comprises a complementarity-determining region heavy chain 1 (CDR-H1) of SEQ ID NO: 741, CDR-H2 of SEQ ID NO: 1283, and CDR-H3 of SEQ ID NO: 1825; and/or a variable light chain region, wherein the variable light chain region comprises a complementarity-determining region light chain 1 (CDR-L1) of SEQ ID NO: 1012, CDR-L2 of SEQ ID NO: 1554, and CDR-L3 of SEQ ID NO: 2096. In some embodiments, the variable heavy chain comprises a polypeptide consensus sequence having at least 95% sequence identity to the amino acid sequence of SEQ ID NO: 199, and the variable light chain comprises a polypeptide consensus sequence having at least 95% sequence identity to the amino acid sequence of SEQ ID NO: 470. In some embodiments, the antibody or antigen binding fragment thereof binds a human NCF4, mouse NCF4, rat NCF4, bovine NCF4, or cynomolgus monkey NCF4. In some embodiments, the human NCF4 comprises a sequence of SEQ ID NO: 4473.

[0338] Provided herein is an antibody that competes with an antibody or antigen binding fragment of any one of claims 847-850 for binding to NCF4, wherein the antibody binds to human NCF4 or mouse NCF4.

[0339] Provided herein is an antibody or an antigen binding fragment thereof that selectively binds to t-complex 11 like 2, transcript variant X2 (TCP11L2) or a variant thereof, comprising at least one of: a variable heavy chain region, wherein the variable heavy chain region comprises a complementarity-determining region heavy chain 1 (CDR-H1) of SEQ ID NO: 741, CDR-H2 of SEQ ID NO: 1283, and CDR-H3 of SEQ ID NO: 1825; and/or a variable light chain region, wherein the variable light chain region comprises a complementarity-determining region light chain 1 (CDR-L1) of SEQ ID NO: 1012, CDR-L2 of SEQ ID NO: 1554, and CDR-L3 of SEQ ID NO: 2096. In some embodiments, the variable heavy chain comprises a polypeptide consensus sequence having at least 95% sequence identity to the amino acid sequence of SEQ ID NO: 199, and the variable light chain comprises a polypeptide consensus sequence having at least 95% sequence identity to the amino acid sequence of SEQ ID NO: 470. In some embodiments, the antibody or antigen binding fragment thereof binds a human TCP11L2, mouse TCP11L2, rat TCP11L2, bovine TCP11L2, or cynomolgus monkey TCP11L2. In some embodiments, the human TCP11L2 comprises a sequence of SEQ ID NO: 4474.

[0340] Provided herein is an antibody that competes with an antibody or antigen binding fragment of any one of claims 852-855 for binding to TCP11L2, wherein the antibody binds to human TCP11L2 or mouse TCP11L2.

[0341] Provided herein is an antibody or an antigen binding fragment thereof that selectively binds to phospholipase C beta 2, transcript variant 4 (PLCB2) or a variant thereof, comprising at least one of: a variable heavy chain region, wherein the variable heavy chain region comprises a complementarity-determining region heavy chain 1 (CDR-H1) of SEQ ID NO: 741, CDR-H2 of SEQ ID NO: 1283, and CDR-H3 of SEQ ID NO: 1825; and/or
[0342] a variable light chain region, wherein the variable light chain region comprises a complementarity-determining region light chain 1 (CDR-L1) of SEQ ID NO: 1012, CDR-L2 of SEQ ID NO: 1554, and CDR-L3 of SEQ ID NO: 2096. In some embodiments, the variable heavy chain comprises a polypeptide consensus sequence having at least 95% sequence identity to the amino acid sequence of SEQ ID NO: 199, and the variable light chain comprises a polypeptide consensus sequence having at least 95% sequence identity to the amino acid sequence of SEQ ID NO: 470. In some embodiments, the antibody or antigen binding fragment thereof binds a human PLCB2, mouse PLCB2, rat PLCB2, bovine PLCB2, or cynomolgus monkey PLCB2. In some embodiments, the human PLCB2 comprises a sequence of SEQ ID NO: 4475.

[0343] Provided herein is an antibody that competes with an antibody or antigen binding fragment of any one of claims 857-860 for binding to PLCB2, wherein the antibody binds to human PLCB2 or mouse PLCB2.

[0344] Provided herein is an antibody or an antigen binding fragment thereof that selectively binds to microtubule associated protein RP/EB family member 2, transcript variant 1 (MAPRE2) or a variant thereof, comprising at least one of: a variable heavy chain region, wherein the variable heavy chain region comprises a complementarity-determining region heavy chain 1 (CDR-H1) of SEQ ID NO: 742, CDR-H2 of SEQ ID NO: 1284, and CDR-H3 of SEQ ID NO: 1826; and/or a variable light chain region, wherein the variable light chain region comprises a complementarity-determining region light chain 1 (CDR-L1) of SEQ ID NO: 1013, CDR-L2 of SEQ ID NO: 1555, and CDR-L3 of SEQ ID NO: 2097. In some embodiments, the variable heavy chain comprises a polypeptide consensus sequence having at least 95% sequence identity to the amino acid sequence of SEQ ID NO: 200, and the variable light chain comprises a polypeptide consensus sequence having at least 95% sequence identity to the amino acid sequence of SEQ ID NO: 471. In some embodiments, the antibody or antigen binding fragment thereof binds a human MAPRE2, mouse MAPRE2, rat MAPRE2, bovine MAPRE2, or cynomolgus monkey MAPRE2. In some embodiments, the human MAPRE2 comprises a sequence of SEQ ID NO: 4476.

[0345] Provided herein is an antibody that competes with an antibody or antigen binding fragment of any one of claims 862-865 for binding to MAPRE2, wherein the antibody binds to human MAPRE2 or mouse MAPRE2.

[0346] Provided herein is an antibody or an antigen binding fragment thereof that selectively binds to DEAD-box helicase 53 (DDX53) or a variant thereof, comprising at least one of: a variable heavy chain region, wherein the variable heavy chain region comprises a complementarity-determining region heavy chain 1 (CDR-H1) of SEQ ID NO: 743, CDR-H2 of SEQ ID NO: 1285, and CDR-H3 of SEQ ID NO: 1827; and/or a variable light chain region, wherein the variable light chain region comprises a complementarity-determining region light chain 1 (CDR-L1) of SEQ ID NO: 1014, CDR-L2 of SEQ ID NO: 1556, and CDR-L3 of SEQ ID NO: 2098. In some embodiments, the variable heavy chain comprises a polypeptide consensus sequence having at least 95% sequence identity to the amino acid sequence of SEQ ID NO: 201, and the variable light chain comprises a polypeptide consensus sequence having at least 95% sequence identity to the amino acid sequence of SEQ ID NO: 472. In some embodiments, the antibody or antigen binding fragment thereof binds a human DDX53, mouse DDX53, rat DDX53, bovine DDX53, or cynomolgus monkey DDX53. In some embodiments, the human DDX53 comprises a sequence of SEQ ID NO: 4477.

[0347] Provided herein is an antibody that competes with an antibody or antigen binding fragment of any one of claims 867-870 for binding to DDX53, wherein the antibody binds to human DDX53 or mouse DDX53.

[0348] Provided herein is an antibody or an antigen binding fragment thereof that selectively binds to interleukin 27 receptor subunit alpha (IL27RA) or a variant thereof, comprising at least one of: a variable heavy chain region, wherein the variable heavy chain region comprises a complementarity-determining region heavy chain 1 (CDR-H1) of SEQ ID NO: 744, CDR-H2 of SEQ ID NO: 1286, and CDR-H3 of SEQ ID NO: 1828; and/or a variable light chain region, wherein the variable light chain region comprises a complementarity-determining region light chain 1 (CDR-L1) of SEQ ID NO: 1015, CDR-L2 of SEQ ID NO: 1557, and CDR-L3 of SEQ ID NO: 2099. In some embodiments, the variable heavy chain comprises a polypeptide consensus sequence having at least 95% sequence identity to the amino acid sequence of SEQ ID NO: 202, and the variable light chain comprises a polypeptide consensus sequence having at least 95% sequence identity to the amino acid sequence of SEQ ID NO: 473. In some embodiments, the antibody or antigen binding fragment thereof binds a human IL27RA, mouse IL27RA, rat IL27RA, bovine IL27RA, or cynomolgus monkey IL27RA. In some embodiments, the human IL27RA comprises a sequence of SEQ ID NO: 4478.

[0349] Provided herein is an antibody that competes with an antibody or antigen binding fragment of any one of claims 872-875 for binding to IL27RA, wherein the antibody binds to human IL27RA or mouse IL27RA.

[0350] Provided herein is an antibody or an antigen binding fragment thereof that selectively binds to Deoxyhypusine synthase (DHPS) or a variant thereof, comprising at least one of: a variable heavy chain region, wherein the variable heavy chain region comprises a complementarity-determining region heavy chain 1 (CDR-H1) of SEQ ID NO: 745, CDR-H2 of SEQ ID NO: 1287, and CDR-H3 of SEQ ID NO: 1829; and/or a variable light chain region, wherein the variable light chain region comprises a complementarity-determining region light chain 1 (CDR-L1) of SEQ ID NO: 1016, CDR-L2 of SEQ ID NO: 1558, and CDR-L3 of SEQ ID NO: 2100. In some embodiments, the variable heavy chain comprises a polypeptide consensus sequence having at least 95% sequence identity to the amino acid sequence of SEQ ID NO: 203, and the variable light chain comprises a polypeptide consensus sequence having at least 95% sequence identity to the amino acid sequence of SEQ ID NO: 474. In some embodiments, the antibody or antigen binding fragment thereof binds a human DHPS, mouse DHPS, rat DHPS, bovine DHPS, or cynomolgus monkey DHPS. In some embodiments, the human DHPS comprises a sequence of SEQ ID NO: 4479.

[0351] Provided herein is an antibody that competes with an antibody or antigen binding fragment of any one of claims 877-880 for binding to DHPS, wherein the antibody binds to human DHPS or mouse DHPS.

[0352] Provided herein is an antibody or an antigen binding fragment thereof that selectively binds to HEAT repeat containing 3, transcript variant 1 (HEATR3) or a variant thereof, comprising at least one of:
[0353] a variable heavy chain region, wherein the variable heavy chain region comprises a complementarity-determining region heavy chain 1 (CDR-H1) of SEQ ID NO: 746, CDR-H2 of SEQ ID NO: 1288, and CDR-H3 of SEQ ID NO: 1830; and/or a variable light chain region, wherein the variable light chain region comprises a complementarity-determining region light chain 1 (CDR-L1) of SEQ ID NO: 1017, CDR-L2 of SEQ ID NO: 1559, and CDR-L3 of SEQ ID NO: 2101. In some embodiments, the variable heavy chain comprises a polypeptide consensus sequence having at least 95% sequence identity to the amino acid sequence of SEQ ID NO: 204, and the variable light chain comprises a polypeptide consensus sequence having at least 95% sequence identity to the amino acid sequence of SEQ ID NO: 475. In some embodiments, the antibody or antigen binding fragment thereof binds a human HEATR3, mouse HEATR3, rat HEATR3, bovine HEATR3, or cynomolgus monkey HEATR3. In some embodiments, the human HEATR3 comprises a sequence of SEQ ID NO: 4480.

[0354] Provided herein is an antibody that competes with an antibody or antigen binding fragment of any one of claims 882-885 for binding to HEATR3, wherein the antibody binds to human HEATR3 or mouse HEATR3.

[0355] Provided herein is an antibody or an antigen binding fragment thereof that selectively binds to DEAD-box helicase 53 (DDX53) or a variant thereof, comprising at least one of: a variable heavy chain region, wherein the variable heavy chain region comprises a complementarity-determining region heavy chain 1 (CDR-H1) of SEQ ID NO: 747, CDR-H2 of SEQ ID NO: 1289, and CDR-H3 of SEQ ID NO: 1831; and/or a variable light chain region, wherein the variable light chain region comprises a complementarity-determining region light chain 1 (CDR-L1) of SEQ ID NO: 1018, CDR-L2 of SEQ ID NO: 1560, and CDR-L3 of SEQ ID NO: 2102. In some embodiments, the variable heavy chain comprises a polypeptide consensus sequence having at least 95% sequence identity to the amino acid sequence of SEQ ID NO: 205, and the variable light chain comprises a polypeptide consensus sequence having at least 95% sequence identity to the amino acid sequence of SEQ ID NO: 476. In some embodiments, the antibody or antigen binding fragment thereof binds a human DDX53, mouse DDX53, rat DDX53, bovine DDX53, or cynomolgus monkey DDX53. In some embodiments, the human DDX53 comprises a sequence of SEQ ID NO: 4477.

[0356] Provided herein is an antibody that competes with an antibody or antigen binding fragment of any one of claims 887-890 for binding to DDX53, wherein the antibody binds to human DDX53 or mouse DDX53.

[0357] Provided herein is an antibody or an antigen binding fragment thereof that selectively binds to Vezatin, adherens junctions transmembrane protein (VEZT) or a variant thereof, comprising at least one of: a variable heavy chain region, wherein the variable heavy chain region comprises a complementarity-determining region heavy chain 1 (CDR-H1) of SEQ ID NO: 747, CDR-H2 of SEQ ID NO: 1289, and CDR-H3 of SEQ ID NO: 1831; and/or a variable light chain region, wherein the variable light chain region comprises a complementarity-determining region light chain 1 (CDR-L1) of SEQ ID NO: 1018, CDR-L2 of SEQ ID NO: 1560, and CDR-L3 of SEQ ID NO: 2102. In some embodiments, the variable heavy chain comprises a polypeptide consensus sequence having at least 95% sequence identity to the amino acid sequence of SEQ ID NO: 205, and the variable light chain comprises a polypeptide consensus sequence having at least 95% sequence identity to the amino acid sequence of SEQ ID NO: 476. In some embodiments, the antibody or antigen binding fragment thereof binds a human VEZT, mouse VEZT, rat VEZT, bovine VEZT, or cynomolgus monkey VEZT. In some embodiments, the human VEZT comprises a sequence of SEQ ID NO: 4481.

[0358] Provided herein is an antibody that competes with an antibody or antigen binding fragment of any one of claims 892-895 for binding to VEZT, wherein the antibody binds to human VEZT or mouse VEZT.

[0359] Provided herein is an antibody or an antigen binding fragment thereof that selectively binds to Wd repeat domain 3 (WDR3) or a variant thereof, comprising at least one of: a variable heavy chain region, wherein the variable heavy chain region comprises a complementarity-determining region heavy chain 1 (CDR-H1) of SEQ ID NO: 747, CDR-H2 of SEQ ID NO: 1289, and CDR-H3 of SEQ ID NO: 1831; and/or a variable light chain region, wherein the variable light chain region comprises a complementarity-determining region light chain 1 (CDR-L1) of SEQ ID NO: 1018, CDR-L2 of SEQ ID NO: 1560, and CDR-L3 of SEQ ID NO: 2102. In some embodiments, the variable heavy chain comprises a polypeptide consensus sequence having at least 95% sequence identity to the amino acid sequence of SEQ ID NO: 205, and the variable light chain comprises a polypeptide consensus sequence having at least 95% sequence identity to the amino acid sequence of SEQ ID NO: 476. In some embodiments, the antibody or antigen binding fragment thereof binds a human WDR3, mouse WDR3, rat WDR3, bovine WDR3, or cynomolgus monkey WDR3. In some embodiments, the human WDR3 comprises a sequence of SEQ ID NO: 4482.

[0360] Provided herein is an antibody that competes with an antibody or antigen binding fragment of any one of claims 897-900 for binding to WDR3, wherein the antibody binds to human WDR3 or mouse WDR3.

[0361] Provided herein is an antibody or an antigen binding fragment thereof that selectively binds to DExD/H-box helicase 58 (DDX58) or a variant thereof, comprising at least one of: a variable heavy chain region, wherein the variable heavy chain region comprises a complementarity-determining region heavy chain 1 (CDR-H1) of SEQ ID NO: 748, CDR-H2 of SEQ ID NO: 1290, and CDR-H3 of SEQ ID NO: 1832; and/or a variable light chain region, wherein the variable light chain region comprises a complementarity-determining region light chain 1 (CDR-L1) of SEQ ID NO: 1019, CDR-L2 of SEQ ID NO: 1561, and CDR-L3 of SEQ ID NO: 2103. In some embodiments, the variable heavy chain comprises a polypeptide consensus sequence having at least 95% sequence identity to the amino acid sequence of SEQ ID NO: 206, and the variable light chain comprises a polypeptide consensus sequence having at least 95% sequence identity to the amino acid sequence of SEQ ID NO: 477. In some embodiments, the antibody or antigen binding fragment thereof binds a human DDX58, mouse DDX58, rat DDX58, bovine DDX58, or cynomolgus monkey DDX58. In some embodiments, the human DDX58 comprises a sequence of SEQ ID NO: 4483.

[0362] Provided herein is an antibody that competes with an antibody or antigen binding fragment of any one of claims 902-905 for binding to DDX58, wherein the antibody binds to human DDX58 or mouse DDX58.

[0363] Provided herein is an antibody or an antigen binding fragment thereof that selectively binds to DExD/H-box helicase 58 (DDX58) or a variant thereof, comprising at least one of: a variable heavy chain region, wherein the variable heavy chain region comprises a complementarity-determining region heavy chain 1 (CDR-H1) of SEQ ID NO: 748, CDR-H2 of SEQ ID NO: 1290, and CDR-H3 of SEQ ID NO: 1832; and/or a variable light chain region, wherein the variable light chain region comprises a complementarity-determining region light chain 1 (CDR-L1) of SEQ ID NO: 1019, CDR-L2 of SEQ ID NO: 1561, and CDR-L3 of SEQ ID NO: 2103. In some embodiments, the variable heavy chain comprises a polypeptide consensus sequence having at least 95% sequence identity to the amino acid sequence of SEQ ID NO: 206, and the variable light chain comprises a polypeptide consensus sequence having at least 95% sequence identity to the amino acid sequence of SEQ ID NO: 477. In some embodiments, the antibody or antigen binding fragment thereof binds a human DDX58, mouse DDX58, rat DDX58, bovine DDX58, or cynomolgus monkey DDX58. In some embodiments, the human DDX58 comprises a sequence of SEQ ID NO: 4483.

[0364] Provided herein is an antibody that competes with an antibody or antigen binding fragment of any one of claims 907-910 for binding to DDX58, wherein the antibody binds to human DDX58 or mouse DDX58.

[0365] Provided herein is an antibody or an antigen binding fragment thereof that selectively binds to nudix hydrolase 22, transcript variant 2 (NUDT22) or a variant thereof, comprising at least one of: a variable heavy chain region, wherein the variable heavy chain region comprises a complementarity-determining region heavy chain 1 (CDR-H1) of SEQ ID NO: 749, CDR-H2 of SEQ ID NO: 1291, and CDR-H3 of SEQ ID NO: 1833; and/or a variable light chain region, wherein the variable light chain region comprises a complementarity-determining region light chain 1 (CDR-L1) of SEQ ID NO: 1020, CDR-L2 of SEQ ID NO: 1562, and CDR-L3 of SEQ ID NO: 2104. In some embodiments, the variable heavy chain comprises a polypeptide consensus sequence having at least 95% sequence identity to the amino acid sequence of SEQ ID NO: 207, and the variable light chain comprises a polypeptide consensus sequence having at least 95% sequence identity to the amino acid sequence of SEQ ID NO: 478. In some embodiments, the antibody or antigen binding fragment thereof binds a human NUDT22, mouse NUDT22, rat NUDT22, bovine NUDT22, or cynomolgus monkey NUDT22. In some embodiments, the human NUDT22 comprises a sequence of SEQ ID NO: 4484.

[0366] Provided herein is an antibody that competes with an antibody or antigen binding fragment of any one of claims 912-915 for binding to NUDT22, wherein the antibody binds to human NUDT22 or mouse NUDT22.

[0367] Provided herein is an antibody or an antigen binding fragment thereof that selectively binds to Jupiter microtubule associated homolog 2 (HN1L) or a variant thereof, comprising at least one of: a variable heavy chain region, wherein the variable heavy chain region comprises a complementarity-determining region heavy chain 1 (CDR-H1) of SEQ ID NO: 750, CDR-H2 of SEQ ID NO: 1292, and CDR-H3 of SEQ ID NO: 1834; and/or a variable light chain region, wherein the variable light chain region comprises a complementarity-determining region light chain 1 (CDR-L1) of SEQ ID NO: 1021, CDR-L2 of SEQ ID NO: 1563, and CDR-L3 of SEQ ID NO: 2105. In some embodiments, the variable heavy chain comprises a polypeptide consensus sequence having at least 95% sequence identity to the amino acid sequence of SEQ ID NO: 208, and

[0368] the variable light chain comprises a polypeptide consensus sequence having at least 95% sequence identity to the amino acid sequence of SEQ ID NO: 479. In some embodiments, the antibody or antigen binding fragment thereof binds a human HN1L, mouse HN1L, rat HN1L, bovine HN1L, or cynomolgus monkey HN1L. In some embodiments, the human HN1L comprises a sequence of SEQ ID NO: 4395.

[0369] Provided herein is an antibody that competes with an antibody or antigen binding fragment of any one of claims 917-920 for binding to HN1L, wherein the antibody binds to human HN1L or mouse HN1L.

[0370] Provided herein is an antibody or an antigen binding fragment thereof that selectively binds to grancalcin, transcript variant 4 (GCA) or a variant thereof, comprising at least one of: a variable heavy chain region, wherein the variable heavy chain region comprises a complementarity-determining region heavy chain 1 (CDR-H1) of SEQ ID NO: 751, CDR-H2 of SEQ ID NO: 1293, and CDR-H3 of SEQ ID NO: 1835; and/or a variable light chain region, wherein the variable light chain region comprises a complementarity-determining region light chain 1 (CDR-L1) of SEQ ID NO: 1022, CDR-L2 of SEQ ID NO: 1564, and CDR-L3 of SEQ ID NO: 2106. In some embodiments, the variable heavy chain comprises a polypeptide consensus sequence having at least 95% sequence identity to the amino acid sequence of SEQ ID NO: 209, and the variable light chain comprises a polypeptide consensus sequence having at least 95% sequence identity to the amino acid sequence of SEQ ID NO: 480. In some embodiments, the antibody or antigen binding fragment thereof binds a human GCA, mouse GCA, rat GCA, bovine GCA, or cynomolgus monkey GCA. In some embodiments, the human GCA comprises a sequence of SEQ ID NO: 4485.

[0371] Provided herein is an antibody that competes with an antibody or antigen binding fragment of any one of claims 922-925 for binding to GCA, wherein the antibody binds to human GCA or mouse GCA.

[0372] Provided herein is an antibody or an antigen binding fragment thereof that selectively binds to endoplasmic reticulum protein 27, transcript variant 1 (ERP27) or a variant thereof, comprising at least one of: a variable heavy chain region, wherein the variable heavy chain region comprises a complementarity-determining region heavy chain 1 (CDR-H1) of SEQ ID NO: 752, CDR-H2 of SEQ ID NO: 1294, and CDR-H3 of SEQ ID NO: 1836; and/or a variable light chain region, wherein the variable light chain region comprises a complementarity-determining region light chain 1 (CDR-L1) of SEQ ID NO: 1023, CDR-L2 of SEQ ID NO: 1565, and CDR-L3 of SEQ ID NO: 2107. In some embodiments, the variable heavy chain comprises a polypeptide consensus sequence having at least 95% sequence identity to the amino acid sequence of SEQ ID NO: 210, and the variable light chain comprises a polypeptide consensus sequence having at least 95% sequence identity to the amino acid sequence of SEQ ID NO: 481. In some embodiments, the antibody or antigen binding fragment thereof binds a human ERP27, mouse ERP27, rat ERP27, bovine ERP27, or cynomolgus monkey ERP27. In some embodiments, the human ERP27 comprises a sequence of SEQ ID NO: 4469.

[0373] Provided herein is an antibody that competes with an antibody or antigen binding fragment of any one of claims 927-930 for binding to ERP27, wherein the antibody binds to human ERP27 or mouse ERP27.

[0374] Provided herein is an antibody or an antigen binding fragment thereof that selectively binds to Rna polymerase iii subunit g (POLR3G) or a variant thereof, comprising at least one of: a variable heavy chain region, wherein the variable heavy chain region comprises a complementarity-determining region heavy chain 1 (CDR-H1) of SEQ ID NO: 753, CDR-H2 of SEQ ID NO: 1295, and CDR-H3 of SEQ ID NO: 1837; and/or a variable light chain region, wherein the variable light chain region comprises a complementarity-determining region light chain 1 (CDR-L1) of SEQ ID NO: 1024, CDR-L2 of SEQ ID NO: 1566, and CDR-L3 of SEQ ID NO: 2108. In some embodiments, the variable heavy chain comprises a polypeptide consensus sequence having at least 95% sequence identity to the amino acid sequence of SEQ ID NO: 211, and the variable light chain comprises a polypeptide consensus sequence having at least 95% sequence identity to the amino acid sequence of SEQ ID NO: 482. In some embodiments, the antibody or antigen binding fragment thereof binds a human POLR3G, mouse POLR3G, rat POLR3G, bovine POLR3G, or cynomolgus monkey POLR3G. In some embodiments, the human POLR3G comprises a sequence of SEQ ID NO: 4486.

[0375] Provided herein is an antibody that competes with an antibody or antigen binding fragment of any one of claims 932-935 for binding to POLR3G, wherein the antibody binds to human POLR3G or mouse POLR3G.

[0376] Provided herein is an antibody or an antigen binding fragment thereof that selectively binds to sorting nexin 1, transcript variant 1 (SNX1) or a variant thereof, comprising at least one of: a variable heavy chain region, wherein the variable heavy chain region comprises a complementarity-determining region heavy chain 1 (CDR-H1) of SEQ ID NO: 754, CDR-H2 of SEQ ID NO: 1296, and CDR-H3 of SEQ ID NO: 1838; and/or a variable light chain region, wherein the variable light chain region comprises a complementarity-determining region light chain 1 (CDR-L1) of SEQ ID NO: 1025, CDR-L2 of SEQ ID NO: 1567, and CDR-L3 of SEQ ID NO: 2109. In some embodiments, the variable heavy chain comprises a polypeptide consensus sequence having at least 95% sequence identity to the amino acid sequence of SEQ ID NO: 212, and the variable light chain comprises a polypeptide consensus sequence having at least 95% sequence identity to the amino acid sequence of SEQ ID NO: 483. In some embodiments, the antibody or antigen binding fragment thereof binds a human SNX1, mouse SNX1, rat SNX1, bovine SNX1, or cynomolgus monkey SNX1. In some embodiments, the human SNX1 comprises a sequence of SEQ ID NO: 4487.

[0377] Provided herein is an antibody that competes with an antibody or antigen binding fragment of any one of claims 937-940 for binding to SNX1, wherein the antibody binds to human SNX1 or mouse SNX1.

[0378] Provided herein is an antibody or an antigen binding fragment thereof that selectively binds to SAA2-SAA3 (AB937783.1_frag) or a variant thereof, comprising at least one of: a variable heavy chain region, wherein the variable heavy chain region comprises a complementarity-determining region heavy chain 1 (CDR-H1) of SEQ ID NO: 755, CDR-H2 of SEQ ID NO: 1297, and CDR-H3 of SEQ ID NO: 1839; and/or a variable light chain region, wherein the variable light chain region comprises a complementarity-determining region light chain 1 (CDR-L1) of SEQ ID NO: 1026, CDR-L2 of SEQ ID NO: 1568, and CDR-L3 of SEQ ID NO: 2110. In some embodiments, the variable heavy chain comprises a polypeptide consensus sequence having at least 95% sequence identity to the amino acid sequence of SEQ ID NO: 213, and the variable light chain comprises a polypeptide consensus sequence having at least 95% sequence identity to the amino acid sequence of SEQ ID NO: 484. In some embodiments, the antibody or antigen binding fragment thereof binds a human AB937783.1_frag, mouse AB937783.1_frag, rat AB937783.1_frag, bovine AB937783.1_frag, or cynomolgus monkey AB937783.1_frag. In some embodiments, the human AB937783.1_frag comprises a sequence of SEQ ID NO: 4488.

[0379] Provided herein is an antibody that competes with an antibody or antigen binding fragment of any one of claims 942-945 for binding to AB937783.1_frag, wherein the antibody binds to human AB937783.1_frag or mouse AB937783.1_frag.

[0380] Provided herein is an antibody or an antigen binding fragment thereof that selectively binds to proteasome 26S subunit, non-ATPase 3 (PSMD3) or a variant thereof, comprising at least one of: a variable heavy chain region, wherein the variable heavy chain region comprises a complementarity-determining region heavy chain 1 (CDR-H1) of SEQ ID NO: 755, CDR-H2 of SEQ ID NO: 1297, and CDR-H3 of SEQ ID NO: 1839; and/or a variable light chain region, wherein the variable light chain region comprises a complementarity-determining region light chain 1 (CDR-L1) of SEQ ID NO: 1026, CDR-L2 of SEQ ID NO: 1568, and CDR-L3 of SEQ ID NO: 2110. In some embodiments, the variable heavy chain comprises a polypeptide consensus sequence having at least 95% sequence identity to the amino acid sequence of SEQ ID NO: 213, and the variable light chain comprises a polypeptide consensus sequence having at least 95% sequence identity to the amino acid sequence of SEQ ID NO: 484. In some embodiments, the antibody or antigen binding fragment thereof binds a human PSMD3, mouse PSMD3, rat PSMD3, bovine PSMD3, or cynomolgus monkey PSMD3. In some embodiments, the human PSMD3 comprises a sequence of SEQ ID NO: 4489.

[0381] Provided herein is an antibody that competes with an antibody or antigen binding fragment of any one of claims 947-950 for binding to PSMD3, wherein the antibody binds to human PSMD3 or mouse PSMD3.

[0382] Provided herein is an antibody or an antigen binding fragment thereof that selectively binds to CRK like proto-oncogene, adaptor protein, transcript variant 1 (CRKL) or a variant thereof, comprising at least one of: a variable heavy chain region, wherein the variable heavy chain region comprises a complementarity-determining region heavy chain 1 (CDR-H1) of SEQ ID NO: 756, CDR-H2 of SEQ ID NO: 1298, and CDR-H3 of SEQ ID NO: 1840; and/or a variable light chain region, wherein the variable light chain region comprises a complementarity-determining region light chain 1 (CDR-L1) of SEQ ID NO: 1027, CDR-L2 of SEQ ID NO: 1569, and CDR-L3 of SEQ ID NO: 2111. In some embodiments, the variable heavy chain comprises a polypeptide consensus sequence having at least 95% sequence identity to the amino acid sequence of SEQ ID NO: 214, and the variable light chain comprises a polypeptide consensus sequence having at least 95% sequence identity to the amino acid sequence of SEQ ID NO: 485. In some embodiments, wherein the antibody or antigen binding fragment thereof binds a human CRKL, mouse CRKL, rat CRKL, bovine CRKL, or cynomolgus monkey CRKL. In some embodiments, the human CRKL comprises a sequence of SEQ ID NO: 4490.

[0383] Provided herein is an antibody that competes with an antibody or antigen binding fragment of any one of claims 952-955 for binding to CRKL, wherein the antibody binds to human CRKL or mouse CRKL.

[0384] Provided herein is an antibody or an antigen binding fragment thereof that selectively binds to F-box protein 2 (FBXO2) or a variant thereof, comprising at least one of: a variable heavy chain region, wherein the variable heavy chain region comprises a complementarity-determining region heavy chain 1 (CDR-H1) of SEQ ID NO: 757, CDR-H2 of SEQ ID NO: 1299, and CDR-H3 of SEQ ID NO: 1841; and/or a variable light chain region, wherein the variable light chain region comprises a complementarity-determining region light chain 1 (CDR-L1) of SEQ ID NO: 1028, CDR-L2 of SEQ ID NO: 1570, and CDR-L3 of SEQ ID NO: 2112. In some embodiments, the variable heavy chain comprises a polypeptide consensus sequence having at least 95% sequence identity to the amino acid sequence of SEQ ID NO: 215, and the variable light chain comprises a polypeptide consensus sequence having at least 95% sequence identity to the amino acid sequence of SEQ ID NO: 486. In some embodiments, the antibody or antigen binding fragment thereof binds a human FBXO2, mouse FBXO2, rat FBXO2, bovine FBXO2, or cynomolgus monkey FBXO2. In some embodiments, the human FBXO2 comprises a sequence of SEQ ID NO: 4491.

[0385] Provided herein is an antibody that competes with an antibody or antigen binding fragment of any one of claims 957-960 for binding to FBXO2, wherein the antibody binds to human FBXO2 or mouse FBXO2.

[0386] Provided herein is an antibody or an antigen binding fragment thereof that selectively binds to tubulin gamma 1 (TUBG1) or a variant thereof, comprising at least one of: a variable heavy chain region, wherein the variable heavy chain region comprises a complementarity-determining region heavy chain 1 (CDR-H1) of SEQ ID NO: 757, CDR-H2 of SEQ ID NO: 1299, and CDR-H3 of SEQ ID NO: 1841; and/or a variable light chain region, wherein the variable light chain region comprises a complementarity-determining region light chain 1 (CDR-L1) of SEQ ID NO: 1028, CDR-L2 of SEQ ID NO: 1570, and CDR-L3 of SEQ ID NO: 2112. In some embodiments, the variable heavy chain comprises a polypeptide consensus sequence having at least 95% sequence identity to the amino acid sequence of SEQ ID NO: 215, and the variable light chain comprises a polypeptide consensus sequence having at least 95% sequence identity to the amino acid sequence of SEQ ID NO: 486. In some embodiments, the antibody or antigen binding fragment thereof binds a human TUBG1, mouse TUBG1, rat TUBG1, bovine TUBG1, or cynomolgus monkey TUBG1. In some embodiments, the human TUBG1 comprises a sequence of SEQ ID NO: 4492.

[0387] Provided herein is an antibody that competes with an antibody or antigen binding fragment of any one of claims 962-965 for binding to TUBG1, wherein the antibody binds to human TUBG1 or mouse TUBG1.

[0388] Provided herein is an antibody or an antigen binding fragment thereof that selectively binds to oxidation resistance 1, transcript variant 1 (OXR1) or a variant thereof, comprising at least one of: a variable heavy chain region, wherein the variable heavy chain region comprises a complementarity-determining region heavy chain 1 (CDR-H1) of SEQ ID NO: 759, CDR-H2 of SEQ ID NO: 1301, and CDR-H3 of SEQ ID NO: 1843; and/or a variable light chain region, wherein the variable light chain region comprises a complementarity-determining region light chain 1 (CDR-L1) of SEQ ID NO: 1030, CDR-L2 of SEQ ID NO: 1572, and CDR-L3 of SEQ ID NO: 2114. In some embodiments, the variable heavy chain comprises a polypeptide consensus sequence having at least 95% sequence identity to the amino acid sequence of SEQ ID NO: 217, and the variable light chain comprises a polypeptide consensus sequence having at least 95% sequence identity to the amino acid sequence of SEQ ID NO: 488. In some embodiments, the antibody or antigen binding fragment thereof binds a human OXR1, mouse OXR1, rat OXR1, bovine OXR1, or cynomolgus monkey OXR1. In some embodiments, wherein the human OXR1 comprises a sequence of SEQ ID NO: 4493.

[0389] Provided herein is an antibody that competes with an antibody or antigen binding fragment of any one of claims 967-970 for binding to OXR1, wherein the antibody binds to human OXR1 or mouse OXR1.

[0390] Provided herein is an antibody or an antigen binding fragment thereof that selectively binds to Ankyrin repeat domain 20 family member a5, pseudogene (ANKRD20A5P) or a variant thereof, comprising at least one of: a variable heavy chain region, wherein the variable heavy chain region comprises a complementarity-determining region heavy chain 1 (CDR-H1) of SEQ ID NO: 760, CDR-H2 of SEQ ID NO: 1302, and CDR-H3 of SEQ ID NO: 1844; and/or a variable light chain region, wherein the variable light chain region comprises a complementarity-determining region light chain 1 (CDR-L1) of SEQ ID NO: 1031, CDR-L2 of SEQ ID NO: 1573, and CDR-L3 of SEQ ID NO: 2115. In some embodiments, the variable heavy chain comprises a polypeptide consensus sequence having at least 95% sequence identity to the amino acid sequence of SEQ ID NO: 218, and the variable light chain comprises a polypeptide consensus sequence having at least 95% sequence identity to the amino acid sequence of SEQ ID NO: 489. In some embodiments, the antibody or antigen binding fragment thereof binds a human ANKRD20A5P, mouse ANKRD20A5P, rat ANKRD20A5P, bovine ANKRD20A5P, or cynomolgus monkey ANKRD20A5P. In some embodiments, the human ANKRD20A5P comprises a sequence of SEQ ID NO: 4494.

[0391] Provided herein is an antibody that competes with an antibody or antigen binding fragment of any one of claims 972-975 for binding to ANKRD20A5P, wherein the antibody binds to human ANKRD20A5P or mouse ANKRD20A5P.

[0392] Provided herein is an antibody or an antigen binding fragment thereof that selectively binds to Kirre like nephrin family adhesion molecule 1 (KIRREL) or a variant thereof, comprising at least one of: a variable heavy chain region, wherein the variable heavy chain region comprises a complementarity-determining region heavy chain 1 (CDR-H1) of SEQ ID NO: 760, CDR-H2 of SEQ ID NO: 1302, and CDR-H3 of SEQ ID NO: 1844; and/or a variable light chain region, wherein the variable light chain region comprises a complementarity-determining region light chain 1 (CDR-L1) of SEQ ID NO: 1031, CDR-L2 of SEQ ID NO: 1573, and CDR-L3 of SEQ ID NO: 2115. In some embodiments, the variable heavy chain comprises a polypeptide consensus sequence having at least 95% sequence identity to the amino acid sequence of SEQ ID NO: 218, and the variable light chain comprises a polypeptide consensus sequence having at least 95% sequence identity to the amino acid sequence of SEQ ID NO: 489. In some embodiments, the antibody or antigen binding fragment thereof binds a human KIRREL, mouse KIRREL, rat KIRREL, bovine KIRREL, or cynomolgus monkey KIRREL. In some embodiments, the human KIRREL comprises a sequence of SEQ ID NO: 4495.

[0393] Provided herein is an antibody that competes with an antibody or antigen binding fragment of any one of claims 977-980 for binding to KIRREL, wherein the antibody binds to human KIRREL or mouse KIRREL.

[0394] Provided herein is an antibody or an antigen binding fragment thereof that selectively binds to GRB10 interacting GYF protein 1, transcript variant X10 (GIGYF1) or a variant thereof, comprising at least one of: a variable heavy chain region, wherein the variable heavy chain region comprises a complementarity-determining region heavy chain 1 (CDR-H1) of SEQ ID NO: 760, CDR-H2 of SEQ ID NO: 1302, and CDR-H3 of SEQ ID NO: 1844; and/or a variable light chain region, wherein the variable light chain region comprises a complementarity-determining region light chain 1 (CDR-L1) of SEQ ID NO: 1031, CDR-L2 of SEQ ID NO: 1573, and CDR-L3 of SEQ ID NO: 2115. In some embodiments, the variable heavy chain comprises a polypeptide consensus sequence having at least 95% sequence identity to the amino acid sequence of SEQ ID NO: 218, and the variable light chain comprises a polypeptide consensus sequence having at least 95% sequence identity to the amino acid sequence of SEQ ID NO: 489. In some embodiments, the antibody or antigen binding fragment thereof binds a human GIGYF1, mouse GIGYF1, rat GIGYF1, bovine GIGYF1, or cynomolgus monkey GIGYF1. In some embodiments, the human GIGYF1 comprises a sequence of SEQ ID NO: 4496.

[0395] Provided herein is an antibody that competes with an antibody or antigen binding fragment of any one of claims 982-985 for binding to GIGYF1, wherein the antibody binds to human GIGYF1 or mouse GIGYF1.

[0396] Provided herein is an antibody or an antigen binding fragment thereof that selectively binds to defensin alpha 3 (DEFA3) or a variant thereof, comprising at least one of: a variable heavy chain region, wherein the variable heavy chain region comprises a complementarity-determining region heavy chain 1 (CDR-H1) of SEQ ID NO: 761, CDR-H2 of SEQ ID NO: 1303, and CDR-H3 of SEQ ID NO: 1845; and/or a variable light chain region, wherein the variable light chain region comprises a complementarity-determining region light chain 1 (CDR-L1) of SEQ ID NO: 1032, CDR-L2 of SEQ ID NO: 1574, and CDR-L3 of SEQ ID NO: 2116. In some embodiments, the variable heavy chain comprises a polypeptide consensus sequence having at least 95% sequence identity to the amino acid sequence of SEQ ID NO: 219, and the variable light chain comprises a polypeptide consensus sequence having at least 95% sequence identity to the amino acid sequence of SEQ ID NO: 490. In some embodiments, the antibody or antigen binding fragment thereof binds a human DEFA3, mouse DEFA3, rat DEFA3, bovine DEFA3, or cynomolgus monkey DEFA3. In some embodiments, the human DEFA3 comprises a sequence of SEQ ID NO: 4497.

[0397] Provided herein is an antibody that competes with an antibody or antigen binding fragment of any one of claims 987-990 for binding to DEFA3, wherein the antibody binds to human DEFA3 or mouse DEFA3.

[0398] Provided herein is an antibody or an antigen binding fragment thereof that selectively binds to radial spoke head 14 homolog (RSPH14) or a variant thereof, comprising at least one of: a variable heavy chain region, wherein the variable heavy chain region comprises a complementarity-determining region heavy chain 1 (CDR-H1) of SEQ ID NO: 762, CDR-H2 of SEQ ID NO: 1304, and CDR-H3 of SEQ ID NO: 1846; and/or a variable light chain region, wherein the variable light chain region comprises a complementarity-determining region light chain 1 (CDR-L1) of SEQ ID NO: 1033, CDR-L2 of SEQ ID NO: 1575, and CDR-L3 of SEQ ID NO: 2117. In some embodiments, the variable heavy chain comprises a polypeptide consensus sequence having at least 95% sequence identity to the amino acid sequence of SEQ ID NO: 220, and the variable light chain comprises a polypeptide consensus sequence having at least 95% sequence identity to the amino acid sequence of SEQ ID NO: 491. In some embodiments, the antibody or antigen binding fragment thereof binds a human RSPH14, mouse RSPH14, rat RSPH14, bovine RSPH14, or cynomolgus monkey RSPH14. In some embodiments, the human RSPH14 comprises a sequence of SEQ ID NO: 4498.

[0399] Provided herein is an antibody that competes with an antibody or antigen binding fragment of any one of claims 992-995 for binding to RSPH14, wherein the antibody binds to human RSPH14 or mouse RSPH14.

[0400] Provided herein is an antibody or an antigen binding fragment thereof that selectively binds to C—C motif chemokine ligand 2 (CCL2) or a variant thereof, comprising at least one of: a variable heavy chain region, wherein the variable heavy chain region comprises a complementarity-determining region heavy chain 1 (CDR-H1) of SEQ ID NO: 763, CDR-H2 of SEQ ID NO: 1305, and CDR-H3 of SEQ ID NO: 1847; and/or a variable light chain region, wherein the variable light chain region comprises a complementarity-determining region light chain 1 (CDR-L1) of SEQ ID NO: 1034, CDR-L2 of SEQ ID NO: 1576, and CDR-L3 of SEQ ID NO: 2118. In some embodiments, the variable heavy chain comprises a polypeptide consensus sequence having at least 95% sequence identity to the amino acid sequence of SEQ ID NO: 221, and the variable light chain comprises a polypeptide consensus sequence having at least 95% sequence identity to the amino acid sequence of SEQ ID NO: 492. In some embodiments, the antibody or antigen binding fragment thereof binds a human CCL2, mouse CCL2, rat CCL2, bovine CCL2, or cynomolgus monkey CCL2. In some embodiments, the human CCL2 comprises a sequence of SEQ ID NO: 4499.

[0401] Provided herein is an antibody that competes with an antibody or antigen binding fragment of any one of claims 997-1000 for binding to CCL2, wherein the antibody binds to human CCL2 or mouse CCL2.

[0402] Provided herein is an antibody or an antigen binding fragment thereof that selectively binds to killer cell lectin like receptor C1, transcript variant 3 (KLRC1) or a variant thereof, comprising at least one of: a variable heavy chain region, wherein the variable heavy chain region comprises a complementarity-determining region heavy chain 1 (CDR-H1) of SEQ ID NO: 764, CDR-H2 of SEQ ID NO: 1306, and CDR-H3 of SEQ ID NO: 1848; and/or a variable light chain region, wherein the variable light chain region comprises a complementarity-determining region light chain 1 (CDR-L1) of SEQ ID NO: 1035, CDR-L2 of SEQ ID NO: 1577, and CDR-L3 of SEQ ID NO: 2119. In some embodiments, the variable heavy chain comprises a polypeptide consensus sequence having at least 95% sequence identity to the amino acid sequence of SEQ ID NO: 222, and the variable light chain comprises a polypeptide consensus sequence having at least 95% sequence identity to the amino acid sequence of SEQ ID NO: 493. In some embodiments, the antibody or antigen binding fragment thereof binds a human KLRC1, mouse KLRC1, rat KLRC1, bovine KLRC1, or cynomolgus monkey KLRC1. In some embodiments, the human KLRC1 comprises a sequence of SEQ ID NO: 4500.

[0403] Provided herein is an antibody that competes with an antibody or antigen binding fragment of any one of claims 1002-1005 for binding to KLRC1, wherein the antibody binds to human KLRC1 or mouse KLRC1.

[0404] Provided herein is an antibody or an antigen binding fragment thereof that selectively binds to kelch like family member 12, transcript variant 2 (KLHL12) or a variant thereof, comprising at least one of: a variable heavy chain region, wherein the variable heavy chain region comprises a complementarity-determining region heavy chain 1 (CDR-H1) of SEQ ID NO: 764, CDR-H2 of SEQ ID NO: 1306, and CDR-H3 of SEQ ID NO: 1848; and/or a variable light chain region, wherein the variable light chain region comprises a complementarity-determining region light chain 1 (CDR-L1) of SEQ ID NO: 1035, CDR-L2 of SEQ ID NO: 1577, and CDR-L3 of SEQ ID NO: 2119. In some embodiments, the variable heavy chain comprises a polypeptide consensus sequence having at least 95% sequence identity to the amino acid sequence of SEQ ID NO: 222, and the variable light chain comprises a polypeptide consensus sequence having at least 95% sequence identity to the amino acid sequence of SEQ ID NO: 493. In some embodiments, the antibody or antigen binding fragment thereof binds a human KLHL12, mouse KLHL12, rat KLHL12, bovine KLHL12, or cynomolgus monkey KLHL12. In some embodiments, the human KLHL12 comprises a sequence of SEQ ID NO: 4501.

[0405] Provided herein is an antibody that competes with an antibody or antigen binding fragment of any one of claims 1007-1010 for binding to KLHL12, wherein the antibody binds to human KLHL12 or mouse KLHL12.

[0406] Provided herein is an antibody or an antigen binding fragment thereof that selectively binds to neural retina leucine zipper, transcript variant X4 (NRL) or a variant thereof, comprising at least one of: a variable heavy chain region, wherein the variable heavy chain region comprises a complementarity-determining region heavy chain 1 (CDR-H1) of SEQ ID NO: 765, CDR-H2 of SEQ ID NO: 1307, and CDR-H3 of SEQ ID NO: 1849; and/or a variable light chain region, wherein the variable light chain region comprises a complementarity-determining region light chain 1 (CDR-L1) of SEQ ID NO: 1036, CDR-L2 of SEQ ID NO: 1578, and CDR-L3 of SEQ ID NO: 2120. In some embodiments, the variable heavy chain comprises a polypeptide consensus sequence having at least 95% sequence identity to the amino acid sequence of SEQ ID NO: 223, and the variable light chain comprises a polypeptide consensus sequence having at least 95% sequence identity to the amino acid sequence of SEQ ID NO: 494. In some embodiments, the antibody or antigen binding fragment thereof binds a human NRL, mouse NRL, rat NRL, bovine NRL, or cynomolgus monkey NRL. In some embodiments, the human NRL comprises a sequence of SEQ ID NO: 4502.

[0407] Provided herein is an antibody that competes with an antibody or antigen binding fragment of any one of claims 1012-1015 for binding to NRL, wherein the antibody binds to human NRL or mouse NRL.

[0408] Provided herein is an antibody or an antigen binding fragment thereof that selectively binds to phospholipase C delta 4 (PLCD4) or a variant thereof, comprising at least one of: a variable heavy chain region, wherein the variable heavy chain region comprises a complementarity-determining region heavy chain 1 (CDR-H1) of SEQ ID NO: 766, CDR-H2 of SEQ ID NO: 1308, and CDR-H3 of SEQ ID NO: 1850; and/or a variable light chain region, wherein the variable light chain region comprises a complementarity-determining region light chain 1 (CDR-L1) of SEQ ID NO: 1037, CDR-L2 of SEQ ID NO: 1579, and CDR-L3 of SEQ ID NO: 2121. In some embodiments, the variable heavy chain comprises a polypeptide consensus sequence having at least 95% sequence identity to the amino acid sequence of SEQ ID NO: 224, and the variable light chain comprises a polypeptide consensus sequence having at least 95% sequence identity to the amino acid sequence of SEQ ID NO: 495. In some embodiments, the antibody or antigen binding fragment thereof binds a human PLCD4, mouse PLCD4, rat PLCD4, bovine PLCD4, or cynomolgus monkey PLCD4. In some embodiments, the human PLCD4 comprises a sequence of SEQ ID NO: 4503.

[0409] Provided herein is an antibody that competes with an antibody or antigen binding fragment of any one of claims 1017-1020 for binding to PLCD4, wherein the antibody binds to human PLCD4 or mouse PLCD4.

[0410] Provided herein is an antibody or an antigen binding fragment thereof that selectively binds to coiled-coil domain containing 74B, transcript variant 2 (CCDC74B) or a variant thereof, comprising at least one of: a variable heavy chain region, wherein the variable heavy chain region comprises a complementarity-determining region heavy chain 1 (CDR-H1) of SEQ ID NO: 767, CDR-H2 of SEQ ID NO: 1309, and CDR-H3 of SEQ ID NO: 1851; and/or a variable light chain region, wherein the variable light chain region comprises a complementarity-determining region light chain 1 (CDR-L1) of SEQ ID NO: 1038, CDR-L2 of SEQ ID NO: 1580, and CDR-L3 of SEQ ID NO: 2122. In some embodiments, the variable heavy chain comprises a polypeptide consensus sequence having at least 95% sequence identity to the amino acid sequence of SEQ ID NO: 225, and the variable light chain comprises a polypeptide consensus sequence having at least 95% sequence identity to the amino acid sequence of SEQ ID NO: 496. In some embodiments, the antibody or antigen binding fragment thereof binds a human CCDC74B, mouse CCDC74B, rat CCDC74B, bovine CCDC74B, or cynomolgus monkey CCDC74B. In some embodiments, the human CCDC74B comprises a sequence of SEQ ID NO: 4504.

[0411] Provided herein is an antibody that competes with an antibody or antigen binding fragment of any one of claims 1022-1025 for binding to CCDC74B, wherein the antibody binds to human CCDC74B or mouse CCDC74B.

[0412] Provided herein is an antibody or an antigen binding fragment thereof that selectively binds to DEAD-box helicase 53 (DDX53) or a variant thereof, comprising at least one of: a variable heavy chain region, wherein the variable heavy chain region comprises a complementarity-determining region heavy chain 1 (CDR-H1) of SEQ ID NO: 768, CDR-H2 of SEQ ID NO: 1310, and CDR-H3 of SEQ ID NO: 1852; and/or a variable light chain region, wherein the variable light chain region comprises a complementarity-determining region light chain 1 (CDR-L1) of SEQ ID NO: 1039, CDR-L2 of SEQ ID NO: 1581, and CDR-L3 of SEQ ID NO: 2123. In some embodiments, the variable heavy chain comprises a polypeptide consensus sequence having at least 95% sequence identity to the amino acid sequence of SEQ ID NO: 226, and the variable light chain comprises a polypeptide consensus sequence having at least 95% sequence identity to the amino acid sequence of SEQ ID NO: 497. In some embodiments, the antibody or antigen binding fragment thereof binds a human DDX53, mouse DDX53, rat DDX53, bovine DDX53, or cynomolgus monkey DDX53. In some embodiments, the human DDX53 comprises a sequence of SEQ ID NO: 4477.

[0413] Provided herein is an antibody that competes with an antibody or antigen binding fragment of any one of claims 1027-1030 for binding to DDX53, wherein the antibody binds to human DDX53 or mouse DDX53.

[0414] Provided herein is an antibody or an antigen binding fragment thereof that selectively binds to HSPA (Hsp70) binding protein 1, transcript variant 2 (HSPBP1) or a variant thereof, comprising at least one of: a variable heavy chain region, wherein the variable heavy chain region comprises a complementarity-determining region heavy chain 1 (CDR-H1) of SEQ ID NO: 769, CDR-H2 of SEQ ID NO: 1311, and CDR-H3 of SEQ ID NO: 1853; and/or a variable light chain region, wherein the variable light chain region comprises a complementarity-determining region light chain 1 (CDR-L1) of SEQ ID NO: 1040, CDR-L2 of SEQ ID NO: 1582, and CDR-L3 of SEQ ID NO: 2124. In some embodiments, the variable heavy chain comprises a polypeptide consensus sequence having at least 95% sequence identity to the amino acid sequence of SEQ ID NO: 227, and the variable light chain comprises a polypeptide consensus sequence having at least 95% sequence identity to the amino acid sequence of SEQ ID NO: 498. In some embodiments, the antibody or antigen binding fragment thereof binds a human HSPBP1, mouse HSPBP1, rat HSPBP1, bovine HSPBP1, or cynomolgus monkey HSPBP1. In some embodiments, the human HSPBP1 comprises a sequence of SEQ ID NO: 4505.

[0415] Provided herein is an antibody that competes with an antibody or antigen binding fragment of any one of claims 1032-1035 for binding to HSPBP1, wherein the antibody binds to human HSPBP1 or mouse HSPBP1.

[0416] Provided herein is an antibody or an antigen binding fragment thereof that selectively binds to heat shock protein family A (Hsp70) member 2 (HSPA2) or a variant thereof, comprising at least one of: a variable heavy chain region, wherein the variable heavy chain region comprises a complementarity-determining region heavy chain 1 (CDR-H1) of SEQ ID NO: 769, CDR-H2 of SEQ ID NO: 1311, and CDR-H3 of SEQ ID NO: 1853; and/or a variable light chain region, wherein the variable light chain region comprises a complementarity-determining region light chain 1 (CDR-L1) of SEQ ID NO: 1040, CDR-L2 of SEQ ID NO: 1582, and CDR-L3 of SEQ ID NO: 2124. In some embodiments, the variable heavy chain comprises a polypeptide consensus sequence having at least 95% sequence identity to the amino acid sequence of SEQ ID NO: 227, and the variable light chain comprises a polypeptide consensus sequence having at least 95% sequence identity to the amino acid sequence of SEQ ID NO: 498. In some embodiments, the antibody or antigen binding fragment thereof binds a human HSPA2, mouse HSPA2, rat HSPA2, bovine HSPA2, or cynomolgus monkey HSPA2. In some embodiments, the human HSPA2 comprises a sequence of SEQ ID NO: 4506.

[0417] Provided herein is an antibody that competes with an antibody or antigen binding fragment of any one of claims 1037-1040 for binding to HSPA2, wherein the antibody binds to human HSPA2 or mouse HSPA2.

[0418] Provided herein is an antibody or an antigen binding fragment thereof that selectively binds to BCL2 associated athanogene 2 (BAG2) or a variant thereof, comprising at least one of: a variable heavy chain region, wherein the variable heavy chain region comprises a complementarity-determining region heavy chain 1 (CDR-H1) of SEQ ID NO: 769, CDR-H2 of SEQ ID NO: 1311, and CDR-H3 of SEQ ID NO: 1853; and/or a variable light chain region, wherein the variable light chain region comprises a complementarity-determining region light chain 1 (CDR-L1) of SEQ ID NO: 1040, CDR-L2 of SEQ ID NO: 1582, and CDR-L3 of SEQ ID NO: 2124. In some embodiments, the variable heavy chain comprises a polypeptide consensus sequence having at least 95% sequence identity to the amino acid sequence of SEQ ID NO: 227, and the variable light chain comprises a polypeptide consensus sequence having at least 95% sequence identity to the amino acid sequence of SEQ ID NO: 498. In some embodiments, the antibody or antigen binding fragment thereof binds a human BAG2, mouse BAG2, rat BAG2, bovine BAG2, or cynomolgus monkey BAG2. In some embodiments, the human BAG2 comprises a sequence of SEQ ID NO: 4507.

[0419] Provided herein is an antibody that competes with an antibody or antigen binding fragment of any one of claims 1042-1045 for binding to BAG2, wherein the antibody binds to human BAG2 or mouse BAG2.

[0420] Provided herein is an antibody or an antigen binding fragment thereof that selectively binds to C—X—C motif chemokine receptor 4, transcript variant 2 (CXCR4) or a variant thereof, comprising at least one of: a variable heavy chain region, wherein the variable heavy chain region comprises a complementarity-determining region heavy chain 1 (CDR-H1) of SEQ ID NO: 770, CDR-H2 of SEQ ID NO: 1312, and CDR-H3 of SEQ ID NO: 1854; and/or a variable light chain region, wherein the variable light chain region comprises a complementarity-determining region light chain 1 (CDR-L1) of SEQ ID NO: 1041, CDR-L2 of SEQ ID NO: 1583, and CDR-L3 of SEQ ID NO: 2125. In some embodiments, the variable heavy chain comprises a polypeptide consensus sequence having at least 95% sequence identity to the amino acid sequence of SEQ ID NO: 228, and the variable light chain comprises a polypeptide consensus sequence having at least 95% sequence identity to the amino acid sequence of SEQ ID NO: 499. In some embodiments, the antibody or antigen binding fragment thereof binds a human CXCR4, mouse CXCR4, rat CXCR4, bovine CXCR4, or cynomolgus monkey CXCR4. In some embodiments, the human CXCR4 comprises a sequence of SEQ ID NO: 4508.

[0421] Provided herein is an antibody that competes with an antibody or antigen binding fragment of any one of claims 1047-1050 for binding to CXCR4, wherein the antibody binds to human CXCR4 or mouse CXCR4.

[0422] Provided herein is an antibody or an antigen binding fragment thereof that selectively binds to Long intergenic non-protein coding ma 242 (LINC00242) or a variant thereof, comprising at least one of: a variable heavy chain region, wherein the variable heavy chain region comprises a complementarity-determining region heavy chain 1 (CDR-H1) of SEQ ID NO: 770, CDR-H2 of SEQ ID NO: 1312, and CDR-H3 of SEQ ID NO: 1854; and/or a variable light chain region, wherein the variable light chain region comprises a complementarity-determining region light chain 1 (CDR-L1) of SEQ ID NO: 1041, CDR-L2 of SEQ ID NO: 1583, and CDR-L3 of SEQ ID NO: 2125. In some embodiments, the variable heavy chain comprises a polypeptide consensus sequence having at least 95% sequence identity to the amino acid sequence of SEQ ID NO: 228, and the variable light chain comprises a polypeptide consensus sequence having at least 95% sequence identity to the amino acid sequence of SEQ ID NO: 499. In some embodiments, the antibody or antigen binding fragment thereof binds a human LINC00242, mouse LINC00242, rat LINC00242, bovine LINC00242, or cynomolgus monkey LINC00242. In some embodiments, the human LINC00242 comprises a sequence of SEQ ID NO: 4509.

[0423] Provided herein is an antibody that competes with an antibody or antigen binding fragment of any one of claims 1052-1055 for binding to LINC00242, wherein the antibody binds to human LINC00242 or mouse LINC00242.

[0424] Provided herein is an antibody or an antigen binding fragment thereof that selectively binds to signal transducer and activator of transcription 5A, transcript variant 2 (STAT5A) or a variant thereof, comprising at least one of: a variable heavy chain region, wherein the variable heavy chain region comprises a complementarity-determining region heavy chain 1 (CDR-H1) of SEQ ID NO: 771, CDR-H2 of SEQ ID NO: 1313, and CDR-H3 of SEQ ID NO: 1855; and/or a variable light chain region, wherein the variable light chain region comprises a complementarity-determining region light chain 1 (CDR-L1) of SEQ ID NO: 1042, CDR-L2 of SEQ ID NO: 1584, and CDR-L3 of SEQ ID NO: 2126. In some embodiments, the variable heavy chain comprises a polypeptide consensus sequence having at least 95% sequence identity to the amino acid sequence of SEQ ID NO: 229, and the variable light chain comprises a polypeptide consensus sequence having at least 95% sequence identity to the amino acid sequence of SEQ ID NO: 500. In some embodiments, the antibody or antigen binding fragment thereof binds a human STAT5A, mouse STAT5A, rat STAT5A, bovine STAT5A, or cynomolgus monkey STAT5A. In some embodiments, the human STAT5A comprises a sequence of SEQ ID NO: 4510.

[0425] Provided herein is an antibody that competes with an antibody or antigen binding fragment of any one of claims 1057-1060 for binding to STAT5A, wherein the antibody binds to human STAT5A or mouse STAT5A.

[0426] Provided herein is an antibody or an antigen binding fragment thereof that selectively binds to quinoid dihydropteridine reductase, transcript variant 1 (QDPR) or a variant thereof, comprising at least one of: a variable heavy chain region, wherein the variable heavy chain region comprises a complementarity-determining region heavy chain 1 (CDR-H1) of SEQ ID NO: 771, CDR-H2 of SEQ ID NO: 1313, and CDR-H3 of SEQ ID NO: 1855; and/or a variable light chain region, wherein the variable light chain region comprises a complementarity-determining region light chain 1 (CDR-L1) of SEQ ID NO: 1042, CDR-L2 of SEQ ID NO: 1584, and CDR-L3 of SEQ ID NO: 2126. In some embodiments, the variable heavy chain comprises a polypeptide consensus sequence having at least 95% sequence identity to the amino acid sequence of SEQ ID NO: 229, and the variable light chain comprises a polypeptide consensus sequence having at least 95% sequence identity to the amino acid sequence of SEQ ID NO: 500. In some embodiments, the antibody or antigen binding fragment thereof binds a human QDPR, mouse QDPR, rat QDPR, bovine QDPR, or cynomolgus monkey QDPR. In some embodiments, the human QDPR comprises a sequence of SEQ ID NO: 4438.

[0427] Provided herein is an antibody that competes with an antibody or antigen binding fragment of any one of claims 1062-1065 for binding to QDPR, wherein the antibody binds to human QDPR or mouse QDPR.

[0428] Provided herein is an antibody or an antigen binding fragment thereof that selectively binds to calcium and integrin binding 1, transcript variant b (CIB1) or a variant thereof, comprising at least one of: a variable heavy chain region, wherein the variable heavy chain region comprises a complementarity-determining region heavy chain 1 (CDR-H1) of SEQ ID NO: 773, CDR-H2 of SEQ ID NO: 1315, and CDR-H3 of SEQ ID NO: 1857; and/or a variable light chain region, wherein the variable light chain region comprises a complementarity-determining region light chain 1 (CDR-L1) of SEQ ID NO: 1044, CDR-L2 of SEQ ID NO: 1586, and CDR-L3 of SEQ ID NO: 2128. In some embodiments, the variable heavy chain comprises a polypeptide consensus sequence having at least 95% sequence identity to the amino acid sequence of SEQ ID NO: 231, and the variable light chain comprises a polypeptide consensus sequence having at least 95% sequence identity to the amino acid sequence of SEQ ID NO: 502. In some embodiments, the antibody or antigen binding fragment thereof binds a human CIB1, mouse CIB1, rat CIB1, bovine CIB1, or cynomolgus monkey CIB1. In some embodiments, the human CIB1 comprises a sequence of SEQ ID NO: 4511.

[0429] Provided herein is an antibody that competes with an antibody or antigen binding fragment of any one of claims 1067-1070 for binding to CIB1, wherein the antibody binds to human CIB1 or mouse CIB1.

[0430] Provided herein is an antibody or an antigen binding fragment thereof that selectively binds to t-SNARE domain containing 1, transcript variant 1 (TSNARE1) or a variant thereof, comprising at least one of: a variable heavy chain region, wherein the variable heavy chain region comprises a complementarity-determining region heavy chain 1 (CDR-H1) of SEQ ID NO: 773, CDR-H2 of SEQ ID NO: 1315, and CDR-H3 of SEQ ID NO: 1857; and/or a variable light chain region, wherein the variable light chain region comprises a complementarity-determining region light chain 1 (CDR-L1) of SEQ ID NO: 1044, CDR-L2 of SEQ ID NO: 1586, and CDR-L3 of SEQ ID NO: 2128. In some embodiments, the variable heavy chain comprises a polypeptide consensus sequence having at least 95% sequence identity to the amino acid sequence of SEQ ID NO: 231, and the variable light chain comprises a polypeptide consensus sequence having at least 95% sequence identity to the amino acid sequence of SEQ ID NO: 502. In some embodiments, the antibody or antigen binding fragment thereof binds a human TSNARE 1, mouse TSNARE1, rat TSNARE1, bovine TSNARE1, or cynomolgus monkey TSNARE1. In some embodiments, the human TSNARE1 comprises a sequence of SEQ ID NO: 4512.

[0431] Provided herein is an antibody that competes with an antibody or antigen binding fragment of any one of claims 1072-1075 for binding to TSNARE1, wherein the antibody binds to human TSNARE1 or mouse TSNARE1.

[0432] Provided herein is an antibody or an antigen binding fragment thereof that selectively binds to HAUS augmin like complex subunit 1, transcript variant 1 (HAUS1) or a variant thereof, comprising at least one of: a variable heavy chain region, wherein the variable heavy chain region comprises a complementarity-determining region heavy chain 1 (CDR-H1) of SEQ ID NO: 774, CDR-H2 of SEQ ID NO: 1316, and CDR-H3 of SEQ ID NO: 1858; and/or a variable light chain region, wherein the variable light chain region comprises a complementarity-determining region light chain 1 (CDR-L1) of SEQ ID NO: 1045, CDR-L2 of SEQ ID NO: 1587, and CDR-L3 of SEQ ID NO: 2129. In some embodiments, the variable heavy chain comprises a polypeptide consensus sequence having at least 95% sequence identity to the amino acid sequence of SEQ ID NO: 232, and the variable light chain comprises a polypeptide consensus sequence having at least 95% sequence identity to the amino acid sequence of SEQ ID NO: 503. In some embodiments, the antibody or antigen binding fragment thereof binds a human HAUS1, mouse HAUS1, rat HAUS1, bovine HAUS1, or cynomolgus monkey HAUS1. In some embodiments, the human HAUS1 comprises a sequence of SEQ ID NO: 4513.

[0433] Provided herein is an antibody that competes with an antibody or antigen binding fragment of any one of claims 1077-1080 for binding to HAUS1, wherein the antibody binds to human HAUS1 or mouse HAUS1.

[0434] Provided herein is an antibody or an antigen binding fragment thereof that selectively binds to DPY30 domain containing 1, transcript variant X4 (DYDC1) or a variant thereof, comprising at least one of: a variable heavy chain region, wherein the variable heavy chain region comprises a complementarity-determining region heavy chain 1 (CDR-H1) of SEQ ID NO: 774, CDR-H2 of SEQ ID NO: 1316, and CDR-H3 of SEQ ID NO: 1858; and/or a variable light chain region, wherein the variable light chain region comprises a complementarity-determining region light chain 1 (CDR-L1) of SEQ ID NO: 1045, CDR-L2 of SEQ ID NO: 1587, and CDR-L3 of SEQ ID NO: 2129. In some embodiments, the variable heavy chain comprises a polypeptide consensus sequence having at least 95% sequence identity to the amino acid sequence of SEQ ID NO: 232, and the variable light chain comprises a polypeptide consensus sequence having at least 95% sequence identity to the amino acid sequence of SEQ ID NO: 503. In some embodiments, the antibody or antigen binding fragment thereof binds a human DYDC1, mouse DYDC1, rat DYDC1, bovine DYDC1, or cynomolgus monkey DYDC1. In some embodiments, the human DYDC1 comprises a sequence of SEQ ID NO: 4514.

[0435] Provided herein is an antibody that competes with an antibody or antigen binding fragment of any one of claims 1082-1085 for binding to DYDC1, wherein the antibody binds to human DYDC1 or mouse DYDC1.

[0436] Provided herein is an antibody or an antigen binding fragment thereof that selectively binds to Transforming growth factor beta 3 (TGFB3) or a variant thereof, comprising at least one of: a variable heavy chain region, wherein the variable heavy chain region comprises a complementarity-determining region heavy chain 1 (CDR-H1) of SEQ ID NO: 775, CDR-H2 of SEQ ID NO: 1317, and CDR-H3 of SEQ ID NO: 1859; and/or a variable light chain region, wherein the variable light chain region comprises a complementarity-determining region light chain 1 (CDR-L1) of SEQ ID NO: 1046, CDR-L2 of SEQ ID NO: 1588, and CDR-L3 of SEQ ID NO: 2130. In some embodiments, the variable heavy chain comprises a polypeptide consensus sequence having at least 95% sequence identity to the amino acid sequence of SEQ ID NO: 233, and the variable light chain comprises a polypeptide consensus sequence having at least 95% sequence identity to the amino acid sequence of SEQ ID NO: 504. In some embodiments, the antibody or antigen binding fragment thereof binds a human TGFB3, mouse TGFB3, rat TGFB3, bovine TGFB3, or cynomolgus monkey TGFB3. In some embodiments, the human TGFB3 comprises a sequence of SEQ ID NO: 4515.

[0437] Provided herein is an antibody that competes with an antibody or antigen binding fragment of any one of claims 1087-1090 for binding to TGFB3, wherein the antibody binds to human TGFB3 or mouse TGFB3.

[0438] Provided herein is an antibody or an antigen binding fragment thereof that selectively binds to chymotrypsinogen B2 (CTRB2) or a variant thereof, comprising at least one of: a variable heavy chain region, wherein the variable heavy chain region comprises a complementarity-determining region heavy chain 1 (CDR-H1) of SEQ ID NO: 776, CDR-H2 of SEQ ID NO: 1318, and CDR-H3 of SEQ ID NO: 1860; and/or a variable light chain region, wherein the variable light chain region comprises a complementarity-determining region light chain 1 (CDR-L1) of SEQ ID NO: 1047, CDR-L2 of SEQ ID NO: 1589, and CDR-L3 of SEQ ID NO: 2131. In some embodiments, the variable heavy chain comprises a polypeptide consensus sequence having at least 95% sequence identity to the amino acid sequence of SEQ ID NO: 234, and the variable light chain comprises a polypeptide consensus sequence having at least 95% sequence identity to the amino acid sequence of SEQ ID NO: 505. In some embodiments, the antibody or antigen binding fragment thereof binds a human CTRB2, mouse CTRB2, rat CTRB2, bovine CTRB2, or cynomolgus monkey CTRB2. In some embodiments, the human CTRB2 comprises a sequence of SEQ ID NO: 4516.

[0439] Provided herein is an antibody that competes with an antibody or antigen binding fragment of any one of claims 1092-1095 for binding to CTRB2, wherein the antibody binds to human CTRB2 or mouse CTRB2. Provided herein is an antibody or an antigen binding fragment thereof that selectively binds to NFKB inhibitor beta, transcript variant 1 (NFKBIB) or a variant thereof, comprising at least one of: a variable heavy chain region, wherein the variable heavy chain region comprises a complementarity-determining region heavy chain 1 (CDR-H1) of SEQ ID NO: 777, CDR-H2 of SEQ ID NO: 1319, and CDR-H3 of SEQ ID NO: 1861; and/or a variable light chain region, wherein the variable light chain region comprises a complementarity-determining region light chain 1 (CDR-L1) of SEQ ID NO: 1048, CDR-L2 of SEQ ID NO: 1590, and CDR-L3 of SEQ ID NO: 2132. In some embodiments, the variable heavy chain comprises a polypeptide consensus sequence having at least 95% sequence identity to the amino acid sequence of SEQ ID NO: 235, and the variable light chain comprises a polypeptide consensus sequence having at least 95% sequence identity to the amino acid sequence of SEQ ID NO: 506.

[0440] In some embodiments, the antibody or antigen binding fragment thereof binds a human NFKBIB, mouse NFKBIB, rat NFKBIB, bovine NFKBIB, or cynomolgus monkey NFKBIB. In some embodiments, the human NFKBIB comprises a sequence of SEQ ID NO: 4517.

[0441] Provided herein is an antibody that competes with an antibody or antigen binding fragment of any one of claims 1097-1100 for binding to NFKBIB, wherein the antibody binds to human NFKBIB or mouse NFKBIB.

[0442] Provided herein is an antibody or an antigen binding fragment thereof that selectively binds to cyclin dependent kinase 2 associated protein 2, transcript variant 1 (CDK2AP2) or a variant thereof, comprising at least one of: a variable heavy chain region, wherein the variable heavy chain region comprises a complementarity-determining region heavy chain 1 (CDR-H1) of SEQ ID NO: 777, CDR-H2 of SEQ ID NO: 1319, and CDR-H3 of SEQ ID NO: 1861; and/or a variable light chain region, wherein the variable light chain region comprises a complementarity-determining region light chain 1 (CDR-L1) of SEQ ID NO: 1048, CDR-L2 of SEQ ID NO: 1590, and CDR-L3 of SEQ ID NO: 2132. In some embodiments, the variable heavy chain comprises a polypeptide consensus sequence having at least 95% sequence identity to the amino acid sequence of SEQ ID NO: 235, and the variable light chain comprises a polypeptide consensus sequence having at least 95% sequence identity to the amino acid sequence of SEQ ID NO: 506. In some embodiments, the antibody or antigen binding fragment thereof binds a human CDK2AP2, mouse CDK2AP2, rat CDK2AP2, bovine CDK2AP2, or cynomolgus monkey CDK2AP2. In some embodiments, the human CDK2AP2 comprises a sequence of SEQ ID NO: 4518.

[0443] Provided herein is an antibody that competes with an antibody or antigen binding fragment of any one of claims 1102-1105 for binding to CDK2AP2, wherein the antibody binds to human CDK2AP2 or mouse CDK2AP2.

[0444] Provided herein is an antibody or an antigen binding fragment thereof that selectively binds to lipase family member N, transcript variant X1 (LIPN) or a variant thereof, comprising at least one of: a variable heavy chain region, wherein the variable heavy chain region comprises a complementarity-determining region heavy chain 1 (CDR-H1) of SEQ ID NO: 778, CDR-H2 of SEQ ID NO: 1320, and CDR-H3 of SEQ ID NO: 1862; and/or a variable light chain region, wherein the variable light chain region comprises a complementarity-determining region light chain 1 (CDR-L1) of SEQ ID NO: 1049, CDR-L2 of SEQ ID NO: 1591, and CDR-L3 of SEQ ID NO: 2133. In some embodiments, the variable heavy chain comprises a polypeptide consensus sequence having at least 95% sequence identity to the amino acid sequence of SEQ ID NO: 236, and the variable light chain comprises a polypeptide consensus sequence having at least 95% sequence identity to the amino acid sequence of SEQ ID NO: 507. In some embodiments, the antibody or antigen binding fragment thereof binds a human LIPN, mouse LIPN, rat LIPN, bovine LIPN, or cynomolgus monkey LIPN. In some embodiments, the human LIPN comprises a sequence of SEQ ID NO: 4519.

[0445] Provided herein is an antibody that competes with an antibody or antigen binding fragment of any one of claims 1107-1110 for binding to LIPN, wherein the antibody binds to human LIPN or mouse LIPN.

[0446] Provided herein is an antibody or an antigen binding fragment thereof that selectively binds to regulator of G protein signaling 14, transcript variant 1 (RGS14) or a variant thereof, comprising at least one of: a variable heavy chain region, wherein the variable heavy chain region comprises a complementarity-determining region heavy chain 1 (CDR-H1) of SEQ ID NO: 779, CDR-H2 of SEQ ID NO: 1321, and CDR-H3 of SEQ ID NO: 1863; and/or a variable light chain region, wherein the variable light chain region comprises a complementarity-determining region light chain 1 (CDR-L1) of SEQ ID NO: 1050, CDR-L2 of SEQ ID NO: 1592, and CDR-L3 of SEQ ID NO: 2134. In some embodiments, the variable heavy chain comprises a polypeptide consensus sequence having at least 95% sequence identity to the amino acid sequence of SEQ ID NO: 237, and the variable light chain comprises a polypeptide consensus sequence having at least 95% sequence identity to the amino acid sequence of SEQ ID NO: 508. In some embodiments, the antibody or antigen binding fragment thereof binds a human RGS14, mouse RGS14, rat RGS14, bovine RGS14, or cynomolgus monkey RGS14. In some embodiments, the human RGS14 comprises a sequence of SEQ ID NO: 4520.

[0447] Provided herein is an antibody that competes with an antibody or antigen binding fragment of any one of claims 1112-1115 for binding to RGS14, wherein the antibody binds to human RGS14 or mouse RGS14.

[0448] Provided herein is an antibody or an antigen binding fragment thereof that selectively binds to leucine rich repeat containing 14, transcript variant 1 (LRRC14) or a variant thereof, comprising at least one of: a variable heavy chain region, wherein the variable heavy chain region comprises a complementarity-determining region heavy chain 1 (CDR-H1) of SEQ ID NO: 779, CDR-H2 of SEQ ID NO: 1321, and CDR-H3 of SEQ ID NO: 1863; and/or a variable light chain region, wherein the variable light chain region comprises a complementarity-determining region light chain 1 (CDR-L1) of SEQ ID NO: 1050, CDR-L2 of SEQ ID NO: 1592, and CDR-L3 of SEQ ID NO: 2134. In some embodiments, the variable heavy chain comprises a polypeptide consensus sequence having at least 95% sequence identity to the amino acid sequence of SEQ ID NO: 237, and the variable light chain comprises a polypeptide consensus sequence having at least 95% sequence identity to the amino acid sequence of SEQ ID NO: 508. In some embodiments, the antibody or antigen binding fragment thereof binds a human LRRC14, mouse LRRC14, rat LRRC14, bovine LRRC14, or cynomolgus monkey LRRC14. In some embodiments, the human LRRC14 comprises a sequence of SEQ ID NO: 4521.

[0449] Provided herein is an antibody that competes with an antibody or antigen binding fragment of any one of claims 1117-1120 for binding to LRRC14, wherein the antibody binds to human LRRC14 or mouse LRRC14.

[0450] Provided herein is an antibody or an antigen binding fragment thereof that selectively binds to transforming growth factor beta induced (TGFBI) or a variant thereof, comprising at least one of: a variable heavy chain region, wherein the variable heavy chain region comprises a complementarity-determining region heavy chain 1 (CDR-H1) of SEQ ID NO: 780, CDR-H2 of SEQ ID NO: 1322, and CDR-H3 of SEQ ID NO: 1864; and/or a variable light chain region, wherein the variable light chain region comprises a complementarity-determining region light chain 1 (CDR-L1) of SEQ ID NO: 1051, CDR-L2 of SEQ ID NO: 1593, and CDR-L3 of SEQ ID NO: 2135. In some embodiments, the variable heavy chain comprises a polypeptide consensus sequence having at least 95% sequence identity to the amino acid sequence of SEQ ID NO: 238, and the variable light chain comprises a polypeptide consensus sequence having at least 95% sequence identity to the amino acid sequence of SEQ ID NO: 509. In some embodiments, the antibody or antigen binding fragment thereof binds a human TGFBI, mouse TGFBI, rat TGFBI, bovine TGFBI, or cynomolgus monkey TGFBI. In some embodiments, the human TGFBI comprises a sequence of SEQ ID NO: 4522.

[0451] Provided herein is an antibody that competes with an antibody or antigen binding fragment of any one of claims 1122-1125 for binding to TGFBI, wherein the antibody binds to human TGFBI or mouse TGFBI.

[0452] Provided herein is an antibody or an antigen binding fragment thereof that selectively binds to BCL2 apoptosis regulator, transcript variant alpha (BCL2) or a variant thereof, comprising at least one of: a variable heavy chain region, wherein the variable heavy chain region comprises a complementarity-determining region heavy chain 1 (CDR-H1) of SEQ ID NO: 782, CDR-H2 of SEQ ID NO: 1324, and CDR-H3 of SEQ ID NO: 1866; and/or a variable light chain region, wherein the variable light chain region comprises a complementarity-determining region light chain 1 (CDR-L1) of SEQ ID NO: 1053, CDR-L2 of SEQ ID NO: 1595, and CDR-L3 of SEQ ID NO: 2137. In some embodiments, the variable heavy chain comprises a polypeptide consensus sequence having at least 95% sequence identity to the amino acid sequence of SEQ ID NO: 240, and the variable light chain comprises a polypeptide consensus sequence having at least 95% sequence identity to the amino acid sequence of SEQ ID NO: 511. In some embodiments, the antibody or antigen binding fragment thereof binds a human BCL2, mouse BCL2, rat BCL2, bovine BCL2, or cynomolgus monkey BCL2. In some embodiments, the human BCL2 comprises a sequence of SEQ ID NO: 4523.

[0453] Provided herein is an antibody that competes with an antibody or antigen binding fragment of any one of claims 1127-1130 for binding to BCL2, wherein the antibody binds to human BCL2 or mouse BCL2.

[0454] Provided herein is an antibody or an antigen binding fragment thereof that selectively binds to DIX domain containing 1, transcript variant 2 (DIXDC1) or a variant thereof, comprising at least one of: a variable heavy chain region, wherein the variable heavy chain region comprises a complementarity-determining region heavy chain 1 (CDR-H1) of SEQ ID NO: 783, CDR-H2 of SEQ ID NO: 1325, and CDR-H3 of SEQ ID NO: 1867; and/or a variable light chain region, wherein the variable light chain region comprises a complementarity-determining region light chain 1 (CDR-L1) of SEQ ID NO: 1054, CDR-L2 of SEQ ID NO: 1596, and CDR-L3 of SEQ ID NO: 2138. In some embodiments, the variable heavy chain comprises a polypeptide consensus sequence having at least 95% sequence identity to the amino acid sequence of SEQ ID NO: 241, and the variable light chain comprises a polypeptide consensus sequence having at least 95% sequence identity to the amino acid sequence of SEQ ID NO: 512. In some embodiments, the antibody or antigen binding fragment thereof binds a human DIXDC1, mouse DIXDC1, rat DIXDC1, bovine DIXDC1, or cynomolgus monkey DIXDC1. In some embodiments, the human DIXDC1 comprises a sequence of SEQ ID NO: 4524.

[0455] Provided herein is an antibody that competes with an antibody or antigen binding fragment of any one of claims 1132-1135 for binding to DIXDC1, wherein the antibody binds to human DIXDC1 or mouse DIXDC1.

[0456] Provided herein is an antibody or an antigen binding fragment thereof that selectively binds to Caspase 8 (CASP8) or a variant thereof, comprising at least one of: a variable heavy chain region, wherein the variable heavy chain region comprises a complementarity-determining region heavy chain 1 (CDR-H1) of SEQ ID NO: 784, CDR-H2 of SEQ ID NO: 1326, and CDR-H3 of SEQ ID NO: 1868; and/or a variable light chain region, wherein the variable light chain region comprises a complementarity-determining region light chain 1 (CDR-L1) of SEQ ID NO: 1055, CDR-L2 of SEQ ID NO: 1597, and CDR-L3 of SEQ ID NO: 2139. In some embodiments, the variable heavy chain comprises a polypeptide consensus sequence having at least 95% sequence identity to the amino acid sequence of SEQ ID NO: 242, and the variable light chain comprises a polypeptide consensus sequence having at least 95% sequence identity to the amino acid sequence of SEQ ID NO: 513. In some embodiments, the antibody or antigen binding fragment thereof binds a human CASP8, mouse CASP8, rat CASP8, bovine CASP8, or cynomolgus monkey CASP8. In some embodiments, the human CASP8 comprises a sequence of SEQ ID NO: 4525.

[0457] Provided herein is an antibody that competes with an antibody or antigen binding fragment of any one of claims 1137-1140 for binding to CASP8, wherein the antibody binds to human CASP8 or mouse CASP8.

[0458] Provided herein is an antibody or an antigen binding fragment thereof that selectively binds to phosphoglucomutase 2 like 1 (PGM2L1) or a variant thereof, comprising at least one of: a variable heavy chain region, wherein the variable heavy chain region comprises a complementarity-determining region heavy chain 1 (CDR-H1) of SEQ ID NO: 784, CDR-H2 of SEQ ID NO: 1326, and CDR-H3 of SEQ ID NO: 1868; and/or a variable light chain region, wherein the variable light chain region comprises a complementarity-determining region light chain 1 (CDR-L1) of SEQ ID NO: 1055, CDR-L2 of SEQ ID NO: 1597, and CDR-L3 of SEQ ID NO: 2139. In some embodiments, the variable heavy chain comprises a polypeptide consensus sequence having at least 95% sequence identity to the amino acid sequence of SEQ ID NO: 242, and the variable light chain comprises a polypeptide consensus sequence having at least 95% sequence identity to the amino acid sequence of SEQ ID NO: 513. In some embodiments, the antibody or antigen binding fragment thereof binds a human PGM2L1, mouse PGM2L1, rat PGM2L1, bovine PGM2L1, or cynomolgus monkey PGM2L1. In some embodiments, the human PGM2L1 comprises a sequence of SEQ ID NO: 4526.

[0459] Provided herein is an antibody that competes with an antibody or antigen binding fragment of any one of claims 1142-1145 for binding to PGM2L1, wherein the antibody binds to human PGM2L1 or mouse PGM2L1.

[0460] Provided herein is an antibody or an antigen binding fragment thereof that selectively binds to programmed cell death 1 (PDCD1) or a variant thereof, comprising at least one of: a variable heavy chain region, wherein the variable heavy chain region comprises a complementarity-determining region heavy chain 1 (CDR-H1) of SEQ ID NO: 785, CDR-H2 of SEQ ID NO: 1327, and CDR-H3 of SEQ ID NO: 1869; and/or a variable light chain region, wherein the variable light chain region comprises a complementarity-determining region light chain 1 (CDR-L1) of SEQ ID NO: 1056, CDR-L2 of SEQ ID NO: 1598, and CDR-L3 of SEQ ID NO: 2140. In some embodiments, the variable heavy chain comprises a polypeptide consensus sequence having at least 95% sequence identity to the amino acid sequence of SEQ ID NO: 243, and the variable light chain comprises a polypeptide consensus sequence having at least 95% sequence identity to the amino acid sequence of SEQ ID NO: 514. In some embodiments, the antibody or antigen binding fragment thereof binds a human PDCD1, mouse PDCD1, rat PDCD1, bovine PDCD1, or cynomolgus monkey PDCD1. In some embodiments, the human PDCD1 comprises a sequence of SEQ ID NO: 4527.

[0461] Provided herein is an antibody that competes with an antibody or antigen binding fragment of any one of claims 1147-1150 for binding to PDCD1, wherein the antibody binds to human PDCD1 or mouse PDCD1.

[0462] Provided herein is an antibody or an antigen binding fragment thereof that selectively binds to glyoxylate and hydroxypyruvate reductase (GRHPR) or a variant thereof, comprising at least one of: a variable heavy chain region, wherein the variable heavy chain region comprises a complementarity-determining region heavy chain 1 (CDR-H1) of SEQ ID NO: 786, CDR-H2 of SEQ ID NO: 1328, and CDR-H3 of SEQ ID NO: 1870; and/or a variable light chain region, wherein the variable light chain region comprises a complementarity-determining region light chain 1 (CDR-L1) of SEQ ID NO: 1057, CDR-L2 of SEQ ID NO: 1599, and CDR-L3 of SEQ ID NO: 2141. In some embodiments, the variable heavy chain comprises a polypeptide consensus sequence having at least 95% sequence identity to the amino acid sequence of SEQ ID NO: 244, and the variable light chain comprises a polypeptide consensus sequence having at least 95% sequence identity to the amino acid sequence of SEQ ID NO: 515. In some embodiments, the antibody or antigen binding fragment thereof binds a human GRHPR, mouse GRHPR, rat GRHPR, bovine GRHPR, or cynomolgus monkey GRHPR. In some embodiments, the human GRHPR comprises a sequence of SEQ ID NO: 4528.

[0463] Provided herein is an antibody that competes with an antibody or antigen binding fragment of any one of claims 1152-1155 for binding to GRHPR, wherein the antibody binds to human GRHPR or mouse GRHPR.

[0464] Provided herein is an antibody or an antigen binding fragment thereof that selectively binds to Cytochrome b5 reductase 2 (CYB5R2) or a variant thereof, comprising at least one of: a variable heavy chain region, wherein the variable heavy chain region comprises a complementarity-determining region heavy chain 1 (CDR-H1) of SEQ ID NO: 787, CDR-H2 of SEQ ID NO: 1329, and CDR-H3 of SEQ ID NO: 1871; and/or a variable light chain region, wherein the variable light chain region comprises a complementarity-determining region light chain 1 (CDR-L1) of SEQ ID NO: 1058, CDR-L2 of SEQ ID NO: 1600, and CDR-L3 of SEQ ID NO: 2142. In some embodiments, the variable heavy chain comprises a polypeptide consensus sequence having at least 95% sequence identity to the amino acid sequence of SEQ ID NO: 245, and the variable light chain comprises a polypeptide consensus sequence having at least 95% sequence identity to the amino acid sequence of SEQ ID NO: 516. In some embodiments, the antibody or antigen binding fragment thereof binds a human CYB5R2, mouse CYB5R2, rat CYB5R2, bovine CYB5R2, or cynomolgus monkey CYB5R2. In some embodiments, the human CYB5R2 comprises a sequence of SEQ ID NO: 4529.

[0465] Provided herein is an antibody that competes with an antibody or antigen binding fragment of any one of claims 1157-1160 for binding to CYB5R2, wherein the antibody binds to human CYB5R2 or mouse CYB5R2.

[0466] Provided herein is an antibody or an antigen binding fragment thereof that selectively binds to acyl-CoA binding domain containing 6 (ACBD6) or a variant thereof, comprising at least one of: a variable heavy chain region, wherein the variable heavy chain region comprises a complementarity-determining region heavy chain 1 (CDR-H1) of SEQ ID NO: 788, CDR-H2 of SEQ ID NO: 1330, and CDR-H3 of SEQ ID NO: 1872; and/or a variable light chain region, wherein the variable light chain region comprises a complementarity-determining region light chain 1 (CDR-L1) of SEQ ID NO: 1059, CDR-L2 of SEQ ID NO: 1601, and CDR-L3 of SEQ ID NO: 2143. In some embodiments, the variable heavy chain comprises a polypeptide consensus sequence having at least 95% sequence identity to the amino acid sequence of SEQ ID NO: 246, and the variable light chain comprises a polypeptide consensus sequence having at least 95% sequence identity to the amino acid sequence of SEQ ID NO: 517. In some embodiments, the antibody or antigen binding fragment thereof binds a human ACBD6, mouse ACBD6, rat ACBD6, bovine ACBD6, or cynomolgus monkey ACBD6. In some embodiments, the human ACBD6 comprises a sequence of SEQ ID NO: 4530.

[0467] Provided herein is an antibody that competes with an antibody or antigen binding fragment of any one of claims 1162-1165 for binding to ACBD6, wherein the antibody binds to human ACBD6 or mouse ACBD6.

[0468] Provided herein is an antibody or an antigen binding fragment thereof that selectively binds to phosducin like (PDCL) or a variant thereof, comprising at least one of: a variable heavy chain region, wherein the variable heavy chain region comprises a complementarity-determining region heavy chain 1 (CDR-H1) of SEQ ID NO: 789, CDR-H2 of SEQ ID NO: 1331, and CDR-H3 of SEQ ID NO: 1873; and/or a variable light chain region, wherein the variable light chain region comprises a complementarity-determining region light chain 1 (CDR-L1) of SEQ ID NO: 1060, CDR-L2 of SEQ ID NO: 1602, and CDR-L3 of SEQ ID NO: 2144. In some embodiments, the variable heavy chain comprises a polypeptide consensus sequence having at least 95% sequence identity to the amino acid sequence of SEQ ID NO: 247, and the variable light chain comprises a polypeptide consensus sequence having at least 95% sequence identity to the amino acid sequence of SEQ ID NO: 518. In some embodiments, the antibody or antigen binding fragment thereof binds a human PDCL, mouse PDCL, rat PDCL, bovine PDCL, or cynomolgus monkey PDCL. In some embodiments, the human PDCL comprises a sequence of SEQ ID NO: 4531.

[0469] Provided herein is an antibody that competes with an antibody or antigen binding fragment of any one of claims 1167-1170 for binding to PDCL, wherein the antibody binds to human PDCL or mouse PDCL.

[0470] Provided herein is an antibody or an antigen binding fragment thereof that selectively binds to Dexd-box helicase 52 (DDX52) or a variant thereof, comprising at least one of: a variable heavy chain region, wherein the variable heavy chain region comprises a complementarity-determining region heavy chain 1 (CDR-H1) of SEQ ID NO: 790, CDR-H2 of SEQ ID NO: 1332, and CDR-H3 of SEQ ID NO: 1874; and/or a variable light chain region, wherein the variable light chain region comprises a complementarity-determining region light chain 1 (CDR-L1) of SEQ ID NO: 1061, CDR-L2 of SEQ ID NO: 1603, and CDR-L3 of SEQ ID NO: 2145. In some embodiments, the variable heavy chain comprises a polypeptide consensus sequence having at least 95% sequence identity to the amino acid sequence of SEQ ID NO: 248, and the variable light chain comprises a polypeptide consensus sequence having at least 95% sequence identity to the amino acid sequence of SEQ ID NO: 519. In some embodiments, the antibody or antigen binding fragment thereof binds a human DDX52, mouse DDX52, rat DDX52, bovine DDX52, or cynomolgus monkey DDX52. In some embodiments, the human DDX52 comprises a sequence of SEQ ID NO: 4532.

[0471] Provided herein is an antibody that competes with an antibody or antigen binding fragment of any one of claims 1172-1175 for binding to DDX52, wherein the antibody binds to human DDX52 or mouse DDX52.

[0472] Provided herein is an antibody or an antigen binding fragment thereof that selectively binds to G protein-coupled receptor 4 (GPR4) or a variant thereof, comprising at least one of: a variable heavy chain region, wherein the variable heavy chain region comprises a complementarity-determining region heavy chain 1 (CDR-H1) of SEQ ID NO: 790, CDR-H2 of SEQ ID NO: 1332, and CDR-H3 of SEQ ID NO: 1874; and/or a variable light chain region, wherein the variable light chain region comprises a complementarity-determining region light chain 1 (CDR-L1) of SEQ ID NO: 1061, CDR-L2 of SEQ ID NO: 1603, and CDR-L3 of SEQ ID NO: 2145. In some embodiments, the variable heavy chain comprises a polypeptide consensus sequence having at least 95% sequence identity to the amino acid sequence of SEQ ID NO: 248, and the variable light chain comprises a polypeptide consensus sequence having at least 95% sequence identity to the amino acid sequence of SEQ ID NO: 519. In some embodiments, the antibody or antigen binding fragment thereof binds a human GPR4, mouse GPR4, rat GPR4, bovine GPR4, or cynomolgus monkey GPR4. In some embodiments, the human GPR4 comprises a sequence of SEQ ID NO: 4533.

[0473] Provided herein is an antibody that competes with an antibody or antigen binding fragment of any one of claims 1177-1180 for binding to GPR4, wherein the antibody binds to human GPR4 or mouse GPR4.

[0474] Provided herein is an antibody or an antigen binding fragment thereof that selectively binds to aarF domain containing kinase 5 (ADCK5) or a variant thereof, comprising at least one of: a variable heavy chain region, wherein the variable heavy chain region comprises a complementarity-determining region heavy chain 1 (CDR-H1) of SEQ ID NO: 791, CDR-H2 of SEQ ID NO: 1333, and CDR-H3 of SEQ ID NO: 1875; and/or a variable light chain region, wherein the variable light chain region comprises a complementarity-determining region light chain 1 (CDR-L1) of SEQ ID NO: 1062, CDR-L2 of SEQ ID NO: 1604, and CDR-L3 of SEQ ID NO: 2146. In some embodiments, the variable heavy chain comprises a polypeptide consensus sequence having at least 95% sequence identity to the amino acid sequence of SEQ ID NO: 249, and the variable light chain comprises a polypeptide consensus sequence having at least 95% sequence identity to the amino acid sequence of SEQ ID NO: 520. In some embodiments, the antibody or antigen binding fragment thereof binds a human ADCK5, mouse ADCK5, rat ADCK5, bovine ADCK5, or cynomolgus monkey ADCK5. In some embodiments, the human ADCK5 comprises a sequence of SEQ ID NO: 4423.

[0475] Provided herein is an antibody that competes with an antibody or antigen binding fragment of any one of claims 1182-1185 for binding to ADCK5, wherein the antibody binds to human ADCK5 or mouse ADCK5.

[0476] Provided herein is an antibody or an antigen binding fragment thereof that selectively binds to DIX domain containing 1, transcript variant 2 (DIXDC1) or a variant thereof, comprising at least one of: a variable heavy chain region, wherein the variable heavy chain region comprises a complementarity-determining region heavy chain 1 (CDR-H1) of SEQ ID NO: 792, CDR-H2 of SEQ ID NO: 1334, and CDR-H3 of SEQ ID NO: 1876; and/or a variable light chain region, wherein the variable light chain region comprises a complementarity-determining region light chain 1 (CDR-L1) of SEQ ID NO: 1063, CDR-L2 of SEQ ID NO: 1605, and CDR-L3 of SEQ ID NO: 2147. In some embodiments, the variable heavy chain comprises a polypeptide consensus sequence having at least 95% sequence identity to the amino acid sequence of SEQ ID NO: 250, and the variable light chain comprises a polypeptide consensus sequence having at least 95% sequence identity to the amino acid sequence of SEQ ID NO: 521. In some embodiments, the antibody or antigen binding fragment thereof binds a human DIXDC1, mouse DIXDC1, rat DIXDC1, bovine DIXDC1, or cynomolgus monkey DIXDC1. In some embodiments, the human DIXDC1 comprises a sequence of SEQ ID NO: 4524.

[0477] Provided herein is an antibody that competes with an antibody or antigen binding fragment of any one of claims 1187-1190 for binding to DIXDC1, wherein the antibody binds to human DIXDC1 or mouse DIXDC1.

[0478] Provided herein is an antibody or an antigen binding fragment thereof that selectively binds to Jupiter microtubule associated homolog 2 (HN1L) or a variant thereof, comprising at least one of: a variable heavy chain region, wherein the variable heavy chain region comprises a complementarity-determining region heavy chain 1 (CDR-H1) of SEQ ID NO: 793, CDR-H2 of SEQ ID NO: 1335, and CDR-H3 of SEQ ID NO: 1877; and/or a variable light chain region, wherein the variable light chain region comprises a complementarity-determining region light chain 1 (CDR-L1) of SEQ ID NO: 1064, CDR-L2 of SEQ ID NO: 1606, and CDR-L3 of SEQ ID NO: 2148. In some embodiments, the variable heavy chain comprises a polypeptide consensus sequence having at least 95% sequence identity to the amino acid sequence of SEQ ID NO: 251, and the variable light chain comprises a polypeptide consensus sequence having at least 95% sequence identity to the amino acid sequence of SEQ ID NO: 522. In some embodiments, the antibody or antigen binding fragment thereof binds a human HN1L, mouse HN1L, rat HN1L, bovine HN1L, or cynomolgus monkey HN1L. In some embodiments, the human HN1L comprises a sequence of SEQ ID NO: 4395.

[0479] Provided herein is an antibody that competes with an antibody or antigen binding fragment of any one of claims 1192-1195 for binding to HN1L, wherein the antibody binds to human HN1L or mouse HN1L.

[0480] Provided herein is an antibody or an antigen binding fragment thereof that selectively binds to G antigen 2A (GAGE2A) or a variant thereof, comprising at least one of: a variable heavy chain region, wherein the variable heavy chain region comprises a complementarity-determining region heavy chain 1 (CDR-H1) of SEQ ID NO: 794, CDR-H2 of SEQ ID NO: 1336, and CDR-H3 of SEQ ID NO: 1878; and/or a variable light chain region, wherein the variable light chain region comprises a complementarity-determining region light chain 1 (CDR-L1) of SEQ ID NO: 1065, CDR-L2 of SEQ ID NO: 1607, and CDR-L3 of SEQ ID NO: 2149. In some embodiments, the variable heavy chain comprises a polypeptide consensus sequence having at least 95% sequence identity to the amino acid sequence of SEQ ID NO: 252, and the variable light chain comprises a polypeptide consensus sequence having at least 95% sequence identity to the amino acid sequence of SEQ ID NO: 523. In some embodiments, the antibody or antigen binding fragment thereof binds a human GAGE2A, mouse GAGE2A, rat GAGE2A, bovine GAGE2A, or cynomolgus monkey GAGE2A. In some embodiments, the human GAGE2A comprises a sequence of SEQ ID NO: 4534.

[0481] Provided herein is an antibody that competes with an antibody or antigen binding fragment of any one of claims 1197-1200 for binding to GAGE2A, wherein the antibody binds to human GAGE2A or mouse GAGE2A.

[0482] Provided herein is an antibody or an antigen binding fragment thereof that selectively binds to DIX domain containing 1, transcript variant 2 (DIXDC1) or a variant thereof, comprising at least one of: a variable heavy chain region, wherein the variable heavy chain region comprises a complementarity-determining region heavy chain 1 (CDR-H1) of SEQ ID NO: 795, CDR-H2 of SEQ ID NO: 1337, and CDR-H3 of SEQ ID NO: 1879; and/or a variable light chain region, wherein the variable light chain region comprises a complementarity-determining region light chain 1 (CDR-L1) of SEQ ID NO: 1066, CDR-L2 of SEQ ID NO: 1608, and CDR-L3 of SEQ ID NO: 2150. In some embodiments, the variable heavy chain comprises a polypeptide consensus sequence having at least 95% sequence identity to the amino acid sequence of SEQ ID NO: 253, and the variable light chain comprises a polypeptide consensus sequence having at least 95% sequence identity to the amino acid sequence of SEQ ID NO: 524. In some embodiments, the antibody or antigen binding fragment thereof binds a human DIXDC1, mouse DIXDC1, rat DIXDC1, bovine DIXDC1, or cynomolgus monkey DIXDC1. In some embodiments, the human DIXDC1 comprises a sequence of SEQ ID NO: 4524.

[0483] Provided herein is an antibody that competes with an antibody or antigen binding fragment of any one of claims 1202-1205 for binding to DIXDC1, wherein the antibody binds to human DIXDC1 or mouse DIXDC1.

[0484] Provided herein is an antibody or an antigen binding fragment thereof that selectively binds to RNA polymerase II subunit E, transcript variant 1 (POLR2E) or a variant thereof, comprising at least one of: a variable heavy chain region, wherein the variable heavy chain region comprises a complementarity-determining region heavy chain 1 (CDR-H1) of SEQ ID NO: 795, CDR-H2 of SEQ ID NO: 1337, and CDR-H3 of SEQ ID NO: 1879; and/or a variable light chain region, wherein the variable light chain region comprises a complementarity-determining region light chain 1 (CDR-L1) of SEQ ID NO: 1066, CDR-L2 of SEQ ID NO: 1608, and CDR-L3 of SEQ ID NO: 2150. In some embodiments, the variable heavy chain comprises a polypeptide consensus sequence having at least 95% sequence identity to the amino acid sequence of SEQ ID NO: 253, and the variable light chain comprises a polypeptide consensus sequence having at least 95% sequence identity to the amino acid sequence of SEQ ID NO: 524. In some embodiments, the antibody or antigen binding fragment thereof binds a human POLR2E, mouse POLR2E, rat POLR2E, bovine POLR2E, or cynomolgus monkey POLR2E. In some embodiments, the human POLR2E comprises a sequence of SEQ ID NO: 4535.

[0485] Provided herein is an antibody that competes with an antibody or antigen binding fragment of any one of claims 1207-1210 for binding to POLR2E, wherein the antibody binds to human POLR2E or mouse POLR2E.

[0486] Provided herein is an antibody or an antigen binding fragment thereof that selectively binds to proliferating cell nuclear antigen, transcript variant 1 (PCNA) or a variant thereof, comprising at least one of: a variable heavy chain region, wherein the variable heavy chain region comprises a complementarity-determining region heavy chain 1 (CDR-H1) of SEQ ID NO: 796, CDR-H2 of SEQ ID NO: 1338, and CDR-H3 of SEQ ID NO: 1880; and/or a variable light chain region, wherein the variable light chain region comprises a complementarity-determining region light chain 1 (CDR-L1) of SEQ ID NO: 1067, CDR-L2 of SEQ ID NO: 1609, and CDR-L3 of SEQ ID NO: 2151. In some embodiments, the variable heavy chain comprises a polypeptide consensus sequence having at least 95% sequence identity to the amino acid sequence of SEQ ID NO: 254, and the variable light chain comprises a polypeptide consensus sequence having at least 95% sequence identity to the amino acid sequence of SEQ ID NO: 525. In some embodiments, the antibody or antigen binding fragment thereof binds a human PCNA, mouse PCNA, rat PCNA, bovine PCNA, or cynomolgus monkey PCNA. In some embodiments, the human PCNA comprises a sequence of SEQ ID NO: 4428.

[0487] Provided herein is an antibody that competes with an antibody or antigen binding fragment of any one of claims 1212-1215 for binding to PCNA, wherein the antibody binds to human PCNA or mouse PCNA.

[0488] Provided herein is an antibody or an antigen binding fragment thereof that selectively binds to BAF chromatin remodeling complex subunit BCL7C, transcript variant 2 (BCL7C) or a variant thereof, comprising at least one of: a variable heavy chain region, wherein the variable heavy chain region comprises a complementarity-determining region heavy chain 1 (CDR-H1) of SEQ ID NO: 797, CDR-H2 of SEQ ID NO: 1339, and CDR-H3 of SEQ ID NO: 1881; and/or a variable light chain region, wherein the variable light chain region comprises a complementarity-determining region light chain 1 (CDR-L1) of SEQ ID NO: 1068, CDR-L2 of SEQ ID NO: 1610, and CDR-L3 of SEQ ID NO: 2152. In some embodiments, the variable heavy chain comprises a polypeptide consensus sequence having at least 95% sequence identity to the amino acid sequence of SEQ ID NO: 255, and the variable light chain comprises a polypeptide consensus sequence having at least 95% sequence identity to the amino acid sequence of SEQ ID NO: 526. In some embodiments, the antibody or antigen binding fragment thereof binds a human BCL7C, mouse BCL7C, rat BCL7C, bovine BCL7C, or cynomolgus monkey BCL7C. In some embodiments, the human BCL7C comprises a sequence of SEQ ID NO: 4536.

[0489] Provided herein is an antibody that competes with an antibody or antigen binding fragment of any one of claims 1217-1220 for binding to BCL7C, wherein the antibody binds to human BCL7C or mouse BCL7C.

[0490] Provided herein is an antibody or an antigen binding fragment thereof that selectively binds to influenza virus NS1A binding protein (IVNS1ABP) or a variant thereof, comprising at least one of: a variable heavy chain region, wherein the variable heavy chain region comprises a complementarity-determining region heavy chain 1 (CDR-H1) of SEQ ID NO: 797, CDR-H2 of SEQ ID NO: 1339, and CDR-H3 of SEQ ID NO: 1881; and/or a variable light chain region, wherein the variable light chain region comprises a complementarity-determining region light chain 1 (CDR-L1) of SEQ ID NO: 1068, CDR-L2 of SEQ ID NO: 1610, and CDR-L3 of SEQ ID NO: 2152. In some embodiments, the variable heavy chain comprises a polypeptide consensus sequence having at least 95% sequence identity to the amino acid sequence of SEQ ID NO: 255, and the variable light chain comprises a polypeptide consensus sequence having at least 95% sequence identity to the amino acid sequence of SEQ ID NO: 526. In some embodiments, the antibody or antigen binding fragment thereof binds a human IVNS1ABP, mouse IVNS1ABP, rat IVNS1ABP, bovine IVNS1ABP, or cynomolgus monkey IVNS1ABP. In some embodiments, the human IVNS1ABP comprises a sequence of SEQ ID NO: 4391.

[0491] Provided herein is an antibody that competes with an antibody or antigen binding fragment of any one of claims 1222-1225 for binding to IVNS1ABP, wherein the antibody binds to human IVNS1ABP or mouse IVNS1ABP.

[0492] Provided herein is an antibody or an antigen binding fragment thereof that selectively binds to cancer/testis antigen 1A (CTAG1A) or a variant thereof, comprising at least one of: a variable heavy chain region, wherein the variable heavy chain region comprises a complementarity-determining region heavy chain 1 (CDR-H1) of SEQ ID NO: 798, CDR-H2 of SEQ ID NO: 1340, and CDR-H3 of SEQ ID NO: 1882; and/or a variable light chain region, wherein the variable light chain region comprises a complementarity-determining region light chain 1 (CDR-L1) of SEQ ID NO: 1069, CDR-L2 of SEQ ID NO: 1611, and CDR-L3 of SEQ ID NO: 2153. In some embodiments, the variable heavy chain comprises a polypeptide consensus sequence having at least 95% sequence identity to the amino acid sequence of SEQ ID NO: 256, and the variable light chain comprises a polypeptide consensus sequence having at least 95% sequence identity to the amino acid sequence of SEQ ID NO: 527. In some embodiments, the antibody or antigen binding fragment thereof binds a human CTAG1A, mouse CTAG1A, rat CTAG1A, bovine CTAG1A, or cynomolgus monkey CTAG1A. In some embodiments, the human CTAG1A comprises a sequence of SEQ ID NO: 4349.

[0493] Provided herein is an antibody that competes with an antibody or antigen binding fragment of any one of claims 1227-1230 for binding to CTAG1A, wherein the antibody binds to human CTAG1A or mouse CTAG1A.

[0494] Provided herein is an antibody or an antigen binding fragment thereof that selectively binds to cancer/testis antigen 1A (CTAG1A) or a variant thereof, comprising at least one of: a variable heavy chain region, wherein the variable heavy chain region comprises a complementarity-determining region heavy chain 1 (CDR-H1) of SEQ ID NO: 802, CDR-H2 of SEQ ID NO: 1344, and CDR-H3 of SEQ ID NO: 1886; and/or a variable light chain region, wherein the variable light chain region comprises a complementarity-determining region light chain 1 (CDR-L1) of SEQ ID NO: 1073, CDR-L2 of SEQ ID NO: 1615, and CDR-L3 of SEQ ID NO: 2157. In some embodiments, the variable heavy chain comprises a polypeptide consensus sequence having at least 95% sequence identity to the amino acid sequence of SEQ ID NO: 260, and the variable light chain comprises a polypeptide consensus sequence having at least 95% sequence identity to the amino acid sequence of SEQ ID NO: 531. In some embodiments, the antibody or antigen binding fragment thereof binds a human CTAG1A, mouse CTAG1A, rat CTAG1A, bovine CTAG1A, or cynomolgus monkey CTAG1A. In some embodiments, the human CTAG1A comprises a sequence of SEQ ID NO: 4349.

[0495] Provided herein is an antibody that competes with an antibody or antigen binding fragment of any one of claims 1232-1235 for binding to CTAG1A, wherein the antibody binds to human CTAG1A or mouse CTAG1A.

[0496] Provided herein is an antibody or an antigen binding fragment thereof that selectively binds to UTP6 small subunit processome component (UTP6) or a variant thereof, comprising at least one of: a variable heavy chain region, wherein the variable heavy chain region comprises a complementarity-determining region heavy chain 1 (CDR-H1) of SEQ ID NO: 803, CDR-H2 of SEQ ID NO: 1345, and CDR-H3 of SEQ ID NO: 1887; and/or a variable light chain region, wherein the variable light chain region comprises a complementarity-determining region light chain 1 (CDR-L1) of SEQ ID NO: 1074, CDR-L2 of SEQ ID NO: 1616, and CDR-L3 of SEQ ID NO: 2158. In some embodiments, the variable heavy chain comprises a polypeptide consensus sequence having at least 95% sequence identity to the amino acid sequence of SEQ ID NO: 261, and the variable light chain comprises a polypeptide consensus sequence having at least 95% sequence identity to the amino acid sequence of SEQ ID NO: 532. In some embodiments, the antibody or antigen binding fragment thereof binds a human UTP6, mouse UTP6, rat UTP6, bovine UTP6, or cynomolgus monkey UTP6. In some embodiments, the human UTP6 comprises a sequence of SEQ ID NO: 4537.

[0497] Provided herein is an antibody that competes with an antibody or antigen binding fragment of any one of claims 1237-1240 for binding to UTP6, wherein the antibody binds to human UTP6 or mouse UTP6.

[0498] Provided herein is an antibody or an antigen binding fragment thereof that selectively binds to cancer/testis antigen 1A (CTAG1A) or a variant thereof, comprising at least one of: a variable heavy chain region, wherein the variable heavy chain region comprises a complementarity-determining region heavy chain 1 (CDR-H1) of SEQ ID NO: 811, CDR-H2 of SEQ ID NO: 1353, and CDR-H3 of SEQ ID NO: 1895; and/or a variable light chain region, wherein the variable light chain region comprises a complementarity-determining region light chain 1 (CDR-L1) of SEQ ID NO: 1082, CDR-L2 of SEQ ID NO: 1624, and CDR-L3 of SEQ ID NO: 2166. In some embodiments, the variable heavy chain comprises a polypeptide consensus sequence having at least 95% sequence identity to the amino acid sequence of SEQ ID NO: 269, and the variable light chain comprises a polypeptide consensus sequence having at least 95% sequence identity to the amino acid sequence of SEQ ID NO: 540. In some embodiments, the antibody or antigen binding fragment thereof binds a human CTAG1A, mouse CTAG1A, rat CTAG1A, bovine CTAG1A, or cynomolgus monkey CTAG1A. In some embodiments, the human CTAG1A comprises a sequence of SEQ ID NO: 4349.

[0499] Provided herein is an antibody that competes with an antibody or antigen binding fragment of any one of claims 1242-1245 for binding to CTAG1A, wherein the antibody binds to human CTAG1A or mouse CTAG1A.

[0500] Provided herein is an antibody or an antigen binding fragment thereof that selectively binds to RP2 activator of ARL3 GTPase (RP2) or a variant thereof, comprising at least one of: a variable heavy chain region, wherein the variable heavy chain region comprises a complementarity-determining region heavy chain 1 (CDR-H1) of SEQ ID NO: 812, CDR-H2 of SEQ ID NO: 1354, and CDR-H3 of SEQ ID NO: 1896; and/or a variable light chain region, wherein the variable light chain region comprises a complementarity-determining region light chain 1 (CDR-L1) of SEQ ID NO: 1083, CDR-L2 of SEQ ID NO: 1625, and CDR-L3 of SEQ ID NO: 2167. In some embodiments, the variable heavy chain comprises a polypeptide consensus sequence having at least 95% sequence identity to the amino acid sequence of SEQ ID NO: 270, and the variable light chain comprises a polypeptide consensus sequence having at least 95% sequence identity to the amino acid sequence of SEQ ID NO: 541. In some embodiments, the antibody or antigen binding fragment thereof binds a human RP2, mouse RP2, rat RP2, bovine RP2, or cynomolgus monkey RP2. In some embodiments, the human RP2 comprises a sequence of SEQ ID NO: 4538.

[0501] Provided herein is an antibody that competes with an antibody or antigen binding fragment of any one of claims 1247-1250 for binding to RP2, wherein the antibody binds to human RP2 or mouse RP2.

### INCORPORATION BY REFERENCE

[0502] All publications, patents, and patent applications mentioned in this specification are herein incorporated by reference to the same extent as if each individual publication, patent, or patent application was specifically and individually indicated to be incorporated by reference.

### BRIEF DISCLOSURE OF THE DRAWINGS

[0503] The novel features of the invention are set forth with particularity in the appended claims. A better understanding of the features and advantages of the present invention will be obtained by reference to the following detailed description that sets forth illustrative embodiments, in which the principles of the invention are utilized, and the accompanying drawings of which:

[0504] FIG. 1 shows an exemplary scheme of computational pipeline used for identifying immunoglobulin clonotypes.

[0505] FIG. 2 demonstrates Multivariate Cox proportional hazards regression analysis for the TCGA-SKCM cohort, with covariates including patient gender, age at diagnosis, tumor stage (TMN system) and the expression of MZB1 and FOXM1 genes. Squares represent the hazard ratio (HR) and the horizontal bars extend from the lower limit to the upper limit of the 95% confidence interval of the estimate of the hazard ratio. The plot also shows the number of considered events (N) and Wald test p-values (p) for the interaction between survival and any covariate.

[0506] FIGS. 3A-3J show alignment visualization of 5 individual patients and immunoglobulin sequences. Individual reads obtained from RNA-seq are shown for the 5 selected patients. The aligned germline VDJ segments are shown at the bottom of each track. IGV colors paired-end alignments that deviate from expectations (horizontal colored lines) and the mismatched bases are displayed as vertical lines in darker shades of gray.

[0507] FIG. 4 depicts an exemplary schema of VDJ identification pipeline.

[0508] FIG. 5 shows a detailed schema of somatic VDJ sequence identification.

[0509] FIG. 6A shows heavy chain and FIG. 6B shows light chain refined alignment for selected patient compared to the initial alignment. Sudden coverage drop can be observed at D segment of heavy chain and the V-J Junction of the light chain.

[0510] FIG. 7 shows assembly visualization of a heavy D segment.

[0511] FIG. 8 shows an IGV plot of heavy chain with a corrected D segment after the alignment stage.

[0512] FIG. 9 illustrates a detailed schema of germline and CDR sequence identification.

[0513] FIGS. 10A-10L show exemplary antibodies identified using the methods described herein, displaying strong evidence of somatic hypermutation.

[0514] FIG. 11 is a schematic illustration demonstrating the use of T-cell receptor fusion polypeptides.

[0515] FIG. 12A represents schematic illustrations demonstrating exemplary variations of reprogrammed T-cell receptor fusion polypeptides (TFPs) of the invention. An exemplary reprogrammed TCR containing a TFP that contains an anti-CAg scFv and a full-length TCR Vα polypeptide fused via a (G4S)3 linker sequence is illustrated.

[0516] FIG. 12B illustrates a series of exemplary reprogrammed TCRs that contain multiple TFPs including i) an anti-CAg scFv and a full-length TCR Vα polypeptide fused via a (G4S)3 linker sequence and ii) an anti-CAg scFv and a full-length TCR Vβ polypeptide fused via a (G4S)3 linker sequence.

[0517] FIG. 12C illustrates an exemplary reprogrammed TCR that contains multiple TFPs including i) an anti-CAg scFv and a truncated (Δ) TCR polypeptide fused via a (G4S)3 linker sequence and ii) an anti-CAg scFv and a full-length CD3 epsilon polypeptide fused via a (G4S)3 linker sequence. The truncated (Δ) TCR polypeptide is truncated by the deletion of the Vα.

[0518] FIG. 12D illustrates an exemplary reprogrammed TCR that contains multiple TFPs including i) an anti-CAg scFv and a truncated (Δ) TCR Vα polypeptide fused via a (G4S)3 linker sequence and ii) an anti-CAg scFv and a truncated (Δ) TCR Vβ polypeptide fused via a (G4S)3 linker sequence. The truncated (Δ) TCR polypeptide is truncated by the deletion of the Vβ.

[0519] FIG. 13 is a schematic illustration demonstrating the use of T-cell receptor fusion polypeptides (TFPs) of the invention. An exemplary TFP contains an anti-CAg VH domain and a full-length CD3 epsilon polypeptide fused via a (G4S)3 linker sequence. When produced by a T-cell or introduced into a T-cell, the TFP associates with other polypeptides of the endogenous T-cell receptor (TCR) (shown to include two CD3 epsilon polypeptides, one CD3 gamma polypeptide, one CD3 delta polypeptide, two CD3 zeta polypeptides, one TCR alpha subunit and one TCR beta subunit, where the horizontal grey segment represents the plasma membrane) to form a reprogrammed TCR in which one or both of the endogenous CD3 epsilon polypeptides are substituted by the TFP.

[0520] FIG. 14 is a series of schematic illustrations demonstrating DNA constructs encoding various TFPs.

[0521] FIG. 15 is protein array data showing specific binding of antigen R-spondin 1, transcript variant 2 by TBLA1001 antibody.

[0522] FIG. 16 is protein array data showing specific binding of zinc finger DHHC-type containing 1, transcript variant 1 by TBLA1003 antibody.

[0523] FIG. 17 is protein array data showing specific binding of retinoid X receptor alpha, transcript variant 1, by TBLA1004 antibody.

[0524] FIG. 18 is protein array data showing specific binding of retinoid X receptor alpha, transcript variant 1, by TBLA1005 antibody.

[0525] FIG. 19 is protein array data showing specific binding of SNAP associated protein, transcript variant 1, by TBLA1006 antibody.

[0526] FIG. 20 is protein array data showing specific binding of glycogen phosphorylase L, transcript variant 1, Reticulocalbin 3, and synaptotagmin 12, transcript variant X4 by TBLA1007 antibody.

[0527] FIG. 21 is protein array data showing specific binding of Nuclear receptor subfamily 2 group f member 6 and protein phosphatase 1 regulatory subunit 13 like, transcript variant 2 by TBLA1008 antibody.

[0528] FIG. 22 is protein array data showing specific binding of olfactory receptor family 6 subfamily Q member 1 (gene/pseudogene) by TBLA1010 antibody.

[0529] FIG. 23 is protein array data showing specific binding of cancer/testis antigen 1A by TBLA1011 antibody.

[0530] FIG. 24 is protein array data showing specific binding of cancer/testis antigen 1A by TBLA1012 antibody.

[0531] FIG. 25 is protein array data showing specific binding of 5-hydroxytryptamine receptor 1E by TBLA1013 antibody.

[0532] FIG. 26 is protein array data showing specific binding of microfibril associated protein 3, transcript variant 3 by TBRE1002 antibody.

[0533] FIG. 27 is protein array data showing specific binding of hyaluronan binding protein 4 by TBRE1004 antibody.

[0534] FIG. 28 is protein array data showing specific binding of glucuronidase, beta pseudogene by TBRE1006 antibody.

[0535] FIG. 29 is protein array data showing specific binding of dual specificity phosphatase 12 and actinin alpha 1, transcript variant 2 by TBRE1007 antibody.

[0536] FIG. 30 is protein array data showing specific binding of zinc finger with KRAB and SCAN domains 4, transcript variant X1 by TBRE1009 antibody.

[0537] FIG. 31 is protein array data showing specific binding of PNMA family member 5, transcript variant 2 by TBRE1011 antibody.

[0538] FIG. 32 is protein array data showing specific binding of kelch like family member 40, and membrane palmitoylated protein 2, transcript variant 3 by TBRE1012 antibody.

[0539] FIG. 33 is protein array data showing specific binding of butyrophilin subfamily 1 member A1 by TBRE1013 antibody.

[0540] FIG. 34 is protein array data showing specific binding of peroxisomal biogenesis factor 11 gamma, transcript variant 1 by TBRE1014 antibody.

[0541] FIG. 35 is protein array data showing specific binding of zinc finger protein 8, SATB homeobox 2 transcript variant 2, and ganglioside induced differentiation associated protein 1 transcript variant 2 by TBRE1017 antibody.

[0542] FIG. 36 is protein array data showing specific binding of catenin alpha like 1, transcript variant 1 by TBRE1023 antibody.

[0543] FIG. 37 is protein array data showing specific binding of FA complementation group G by TBRE1024 antibody.

[0544] FIG. 38 is protein array data showing specific binding of DEAD-box helicase 18, syntaxin 1A, transcript variant 1, and geminin DNA replication inhibitor, transcript variant 1, by TBRE1027 antibody.

[0545] FIG. 39 is protein array data showing specific binding of ubiquilin 1, transcript variant 2 and carnosine dipeptidase 2, transcript variant 1 by TBRE1030 antibody.

[0546] FIG. 40 is protein array data showing specific binding of X-linked inhibitor of apoptosis, transcript variant 2, and hyaluronan binding protein 4 by TBRE1032 antibody.

[0547] FIG. 41 is protein array data showing specific binding of endosome associated trafficking regulator 1, transcript variant 2 charged multivesicular body protein 4B by TBRE1034 antibody.

[0548] FIG. 42 is protein array data showing specific binding of glycogenin 2, transcript variant 2 by TBRE1035 antibody.

[0549] FIG. 43 is protein array data showing specific binding of Egf like and emi domain containing 1, pseudogene by TBRE1036 antibody.

[0550] FIG. 44 is protein array data showing specific binding of actinin alpha 4, transcript variant 1 by TBRE1038 antibody.

[0551] FIG. 45 is protein array data showing specific binding of PNMA family member 5, transcript variant 2 phospholipase C delta 1, transcript variant 2, and zinc finger protein 326, transcript variant 1 by TBRE1039 antibody.

[0552] FIG. 46 is protein array data showing specific binding of LN608403.1_frag, JPX transcript XIST activator, and odorant binding protein 2A, transcript variant alpha by TBRE1045 antibody.

[0553] FIG. 47 is protein array data showing specific binding of myelin transcription factor 1 like, transcript variant 2 heat shock protein family E (Hsp10) member 1 by TBRE1049 antibody.

[0554] FIG. 48 is protein array data showing specific binding of kelch like ECH associated protein 1, transcript variant 1 by TBRE1052 antibody.

[0555] FIG. 49 is protein array data showing specific binding of nucleosome assembly protein 1 like 1, transcript variant 1 by TCER1001 antibody.

[0556] FIG. 50 is protein array data showing specific binding of nudE neurodevelopment protein 1, transcript variant 1 by TCER1002 antibody.

[0557] FIG. 51 is protein array data showing specific binding of TruB pseudouridine synthase family member 1 inosine monophosphate dehydrogenase 2, and phospholipid scramblase 4, transcript variant X4 by TCER1003 antibody.

[0558] FIG. 52 is protein array data showing specific binding of influenza virus NS1A binding protein by TCER1004 antibody.

[0559] FIG. 53 is protein array data showing specific binding of dishevelled segment polarity protein 3, and Zinc finger protein 260 by TCER1005 antibody.

[0560] FIG. 54 is protein array data showing specific binding of sorting nexin 33, transcript variant 1 by TCER1006 antibody.

[0561] FIG. 55 is protein array data showing specific binding of Jupiter microtubule associated homolog 2, and thioesterase superfamily member 6, transcript variant 1 by TCER1007 antibody.

[0562] FIG. 56 is protein array data showing specific binding of KH RNA binding domain containing, signal transduction associated 2, transcript variant 2 by TCHO1001 antibody.

[0563] FIG. 57 is protein array data showing specific binding of complement C1q like 3 by TCOL1001 antibody.

[0564] FIG. 58 is protein array data showing specific binding of protein phosphatase 1 regulatory subunit 27 by TCOL1002 antibody.

[0565] FIG. 59 is protein array data showing specific binding of deoxyribonuclease 1 like 2, transcript variant 1 by TCOL1003 antibody.

[0566] FIG. 60 is protein array data showing specific binding of extended synaptotagmin 2 by TCOL1004 antibody.

[0567] FIG. 61 is protein array data showing specific binding of C—C motif chemokine ligand 18 by TCOL1005 antibody.

[0568] FIG. 62 is protein array data showing specific binding of homeobox and leucine zipper encoding and BAR/IMD domain containing adaptor protein 2, transcript variant 3 by TCOL1006 antibody.

[0569] FIG. 63 is protein array data showing specific binding of kelch like ECH associated protein 1, transcript variant 1 by TCOL1007 antibody.

[0570] FIG. 64 is protein array data showing specific binding of RUN and FYVE domain containing 3, transcript variant 2 by TCOL1008 antibody.

[0571] FIG. 65A is protein array data showing specific binding of LIM homeobox 5, transcript variant 2 by TCOL1009 antibody. FIG. 65B is protein array data showing specific binding of growth factor receptor bound protein 2, transcript variant 1 by TCOL1009 antibody.

[0572] FIG. 66 is protein array data showing specific binding of Tyrosine hydroxylase by TESO1001 antibody.

[0573] FIG. 67 is protein array data showing specific binding of leucine rich repeat containing 28, transcript variant 1 by TESO1003 antibody.

[0574] FIG. 68A is protein array data showing specific binding of spermatogenesis associated 33, transcript variant 2 by TESO1005 antibody. FIG. 68B is an experimental replicate.

[0575] FIG. 69 is protein array data showing specific binding of Atpase secretory pathway ca2+ transporting 1, and teashirt zinc finger homeobox 2, transcript variant 1 by TESO1006 antibody.

[0576] FIG. 70 is protein array data showing specific binding of Complement component 4 binding protein beta by THNS1002 antibody.

[0577] FIG. 71 is protein array data showing specific binding of NCCRP1, F-box associated domain containing, and coiled-coil domain containing 102A, transcript variant X1 by THNS1003 antibody.

[0578] FIG. 72 is protein array data showing specific binding of RNA binding motif protein 47, transcript variant X10 by THNS1004 antibody.

[0579] FIG. 73 is protein array data showing specific binding of RAD1 checkpoint DNA exonuclease, transcript variant 1, and Microtubule associated scaffold protein 1 by THNS1006 antibody.

[0580] FIG. 74 is protein array data showing specific binding of kelch like ECH associated protein 1, transcript variant 1 by THNS1008 antibody.

[0581] FIG. 75 is protein array data showing specific binding of PNMA family member 5, transcript variant 2 by THNS1009 antibody.

[0582] FIG. 76 is protein array data showing specific binding of G protein-coupled receptor 83, transcript variant 1 by THNS1013 antibody.

[0583] FIG. 77 is protein array data showing specific binding of CDP-diacylglycerol synthase 1, and dynein axonemal assembly factor 3, transcript variant 3 by THNS1014 antibody.

[0584] FIG. 78 is protein array data showing specific binding of copine 1, transcript variant 2 by TKIC1001 antibody.

[0585] FIG. 79 is protein array data showing specific binding of aarF domain containing kinase 5 by TKIC1002 antibody.

[0586] FIG. 80 is protein array data showing specific binding of crystallin alpha B, transcript variant 2 by TKIC1004 antibody.

[0587] FIG. 81 is protein array data showing specific binding of hematopoietic cell-specific Lyn substrate 1, transcript variant 1 by TKIC1005 antibody.

[0588] FIG. 82 is protein array data showing specific binding of aldo-keto reductase family 1 member B, transcript variant 1 by TKIC1006 antibody.

[0589] FIG. 83 is protein array data showing specific binding of surfeit 6, transcript variant 1 by TKIC1007 antibody.

[0590] FIG. 84A is protein array data showing specific binding of S100 calcium binding protein B by TKIC10012 antibody. FIG. 84B is an experimental replicate showing specific binding of S100 calcium binding protein B by TKIC10012 antibody.

[0591] FIG. 85 is protein array data showing specific binding of checkpoint kinase 2, transcript variant 3 by TKIC10013 antibody.

[0592] FIG. 86A is protein array data showing specific binding of ankyrin repeat domain 53, transcript variant 2 by TKIC10019 antibody. FIG. 86B is an experimental replicate showing specific binding of ankyrin repeat domain 53, transcript variant 2 by TKIC10019 antibody.

[0593] FIG. 87 is protein array data showing specific binding of Killer cell lectin like receptor g2, tripartite motif containing 35, transcript variant 1, and FMR1 autosomal homolog 2 by TLUA1001 antibody.

[0594] FIG. 88A is protein array data showing specific binding of annexin A1 by TLUA1004 antibody. FIG. 88B is an experimental replicate showing specific binding of annexin A1 by TLUA1004 antibody.

[0595] FIG. 89 is protein array data showing specific binding of zinc finger protein 287, transcript variant 2 by TLUA1008 antibody.

[0596] FIG. 90 is protein array data showing specific binding of family with sequence similarity 177 member A1, transcript variant 2 by TLUA1016 antibody.

[0597] FIG. 91 is protein array data showing specific binding of quinoid dihydropteridine reductase, transcript variant 1 by TLUS1001 antibody.

[0598] FIG. 92 is protein array data showing specific binding of ELK2, member of ETS oncogene family, pseudogene 1, and methyltransferase like 21C by TLUS1003 antibody.

[0599] FIG. 93 is protein array data showing specific binding of hydroxymethylbilane synthase, transcript variant X3, and hook microtubule tethering protein 2, transcript variant 2 by TLUS1006 antibody.

[0600] FIG. 94 is protein array data showing specific binding of Magel2, and serine and arginine rich splicing factor 3, transcript variant 1 by TMEL1016 antibody.

[0601] FIG. 95 is protein array data showing specific binding of RAN binding protein 10, transcript variant 1, and Wnt family member 9 by TMEL1017 antibody.

[0602] FIG. 96 is protein array data showing specific binding of ubiquilin 2, ubiquilin 1, transcript variant 2, and Ubiquilin 3 by TMEL1018 antibody.

[0603] FIG. 97 is protein array data showing specific binding of anterior gradient 3, protein disulphide isomerase family member by TMEL1020 antibody.

[0604] FIG. 98 is protein array data showing specific binding of serine and arginine rich splicing factor 3, transcript variant 1 by TMEL1022 antibody.

[0605] FIG. 99A is protein array data showing specific binding of baculoviral IAP repeat containing 7, transcript variant 1 by TMEL1023 antibody. FIG. 99B is an experimental replicate showing specific binding of baculoviral IAP repeat containing 7, transcript variant 1 by TMEL1023 antibody.

[0606] FIG. 100 is protein array data showing specific binding of endosome associated trafficking regulator 1, transcript variant 2 by TMEL1025 antibody.

[0607] FIG. 101 is protein array data showing specific binding of microtubule associated scaffold protein 2, transcript variant 2 by TMEL1027 antibody.

[0608] FIG. 102 is protein array data showing specific binding of zinc finger protein 296 phosphodiesterase 5A, transcript variant 1, and Ep400 pseudogene 1 by TMEL1028 antibody.

[0609] FIG. 103 is protein array data showing specific binding of Bcl2 like 1 by TMEL1030 antibody.

[0610] FIG. 104 is protein array data showing specific binding of arginine and glutamate rich 1, and SAS-6 centriolar assembly protein, transcript variant 2 by TMEL1031 antibody.

[0611] FIG. 105 is protein array data showing specific binding of proteasome 26S subunit, non-ATPase 4, transcript variant 2, and Src like adaptor, transcript variant 1 by TMEL1032 antibody.

[0612] FIG. 106 is protein array data showing specific binding of nudix hydrolase 21 zinc finger protein 431, transcript variant 2, and Zinc finger protein 699 by TMEL1033 antibody.

[0613] FIG. 107 is protein array data showing specific binding of quinoid dihydropteridine reductase, transcript variant 1 by TMEL1034 antibody.

[0614] FIG. 108 is protein array data showing specific binding of PAGE family member 2 keratin associated protein 12-3 by TMEL1035 antibody.

[0615] FIG. 109 is protein array data showing specific binding of enolase 2 chromosome 11 open reading frame 68, transcript variant 1 by TMEL1037 antibody.

[0616] FIG. 110 is protein array data showing specific binding of enolase 2 chromosome 11 open reading frame 68, transcript variant 1 by TMEL1037 antibody.

[0617] FIG. 111 is protein array data showing specific binding of serpin family B member 6, transcript variant 2 by TMEL1040 antibody.

[0618] FIG. 112 is protein array data showing specific binding of Dpy-30 histone methyltransferase complex regulatory subunit, and rhophilin associated tail protein 1 like, transcript variant 2 by TMEL1041 antibody.

[0619] FIG. 113 is protein array data showing specific binding of endosome associated trafficking regulator 1, transcript variant 2 by TMES1001 antibody.

[0620] FIG. 114 is protein array data showing specific binding of Jupiter microtubule associated homolog 2, and BTB domain containing 8 by TMES1002 antibody.

[0621] FIG. 115 is protein array data showing specific binding of neutrophil cytosolic factor 4, transcript variant 2, t-complex 11 like 2, transcript variant X2, and phospholipase C beta 2, transcript variant 4 by TMES1003 antibody.

[0622] FIG. 116 is protein array data showing specific binding of microtubule associated protein RP/EB family member 2, transcript variant 1 by TMES1004 antibody.

[0623] FIG. 117 is protein array data showing specific binding of DEAD-box helicase 53 by TOVA1001 antibody.

[0624] FIG. 118 is protein array data showing specific binding of interleukin 27 receptor subunit alpha by TOVA1002 antibody.

[0625] FIG. 119 is protein array data showing specific binding of Deoxyhypusine synthase by TOVA1003 antibody.

[0626] FIG. 120A is protein array data showing specific binding of HEAT repeat containing 3, transcript variant 1 by TOVA1004 antibody. FIG. 120B is an experimental replicate showing specific binding of HEAT repeat containing 3, transcript variant 1 by TOVA1004 antibody.

[0627] FIG. 121 is protein array data showing specific binding of DEAD-box helicase 53, Vezatin, adherens junctions transmembrane protein, and Wd repeat domain 3 by TOVA1005 antibody.

[0628] FIG. 122A is protein array data showing specific binding of DExD/H-box helicase 58 by TOVA1006 antibody. FIG. 122B is an experimental replicate showing specific binding of DExD/H-box helicase 58 by TOVA1006 antibody.

[0629] FIG. 123 is protein array data showing specific binding of nudix hydrolase 22, transcript variant 2 by TOVA1007 antibody.

[0630] FIG. 124 is protein array data showing specific binding of Jupiter microtubule associated homolog 2 by TOVA1008 antibody.

[0631] FIG. 125 is protein array data showing specific binding of grancalcin, transcript variant 4 by TPAN1001 antibody.

[0632] FIG. 126 is protein array data showing specific binding of endoplasmic reticulum protein 27, transcript variant 1 by TPAN1002 antibody.

[0633] FIG. 127 is protein array data showing specific binding of Rna polymerase iii subunit g by TPAN1003 antibody.

[0634] FIG. 128 is protein array data showing specific binding of sorting nexin 1, transcript variant 1 by TPAN1004 antibody.

[0635] FIG. 129 is protein array data showing specific binding of SAA2-SAA3, and proteasome 26S subunit, non-ATPase 3 by TPAN1005 antibody.

[0636] FIG. 130A is protein array data showing specific binding of CRK like proto-oncogene, adaptor protein, transcript variant 1 by TPAN1006 antibody. FIG. 130B is an experimental replicate showing specific binding of CRK like proto-oncogene, adaptor protein, transcript variant 1 by TPAN1006 antibody.

[0637] FIG. 131 is protein array data showing specific binding of F-box protein 2, and tubulin gamma 1 by TPAN1007 antibody.

[0638] FIG. 132 is protein array data showing specific binding of oxidation resistance 1, transcript variant 1 by TPRO1001 antibody.

[0639] FIG. 133 is protein array data showing specific binding of Ankyrin repeat domain 20 family member a5, pseudogene, Kirre like nephrin family adhesion molecule 1, and GRB10 interacting GYF protein 1, transcript variant X10 by TPRO1002 antibody.

[0640] FIG. 134 is protein array data showing specific binding of defensin alpha 3 by TPRO1003 antibody.

[0641] FIG. 135 is protein array data showing specific binding of radial spoke head 14 homolog by TREC1001 antibody.

[0642] FIG. 136 is protein array data showing specific binding of C—C motif chemokine ligand 2 by TREC1002 antibody.

[0643] FIG. 137 is protein array data showing specific binding of killer cell lectin like receptor C1, transcript variant 3, and kelch like family member 12, transcript variant 2 by TREC1003 antibody.

[0644] FIG. 138 is protein array data showing specific binding of neural retina leucine zipper, transcript variant X4 by TSAR1001 antibody.

[0645] FIG. 139 is protein array data showing specific binding of phospholipase C delta 4 by TSAR1002 antibody.

[0646] FIG. 140 is protein array data showing specific binding of coiled-coil domain containing 74B, transcript variant 2 by TSAR1003 antibody.

[0647] FIG. 141 is protein array data showing specific binding of DEAD-box helicase 53 by TSAR1004 antibody.

[0648] FIG. 142 is protein array data showing specific binding of HSPA (Hsp70) binding protein 1, transcript variant 2, heat shock protein family A (Hsp70) member 2, and BCL2 associated athanogene 2 by TSAR1005 antibody.

[0649] FIG. 143A is protein array data showing specific binding of C—X—C motif chemokine receptor 4, transcript variant 2 by TSAR1006 antibody. FIG. 143B is protein array data showing specific binding of Long intergenic non-protein coding ma 242 by TSAR1006 antibody.

[0650] FIG. 144 is protein array data showing specific binding of signal transducer and activator of transcription 5A, transcript variant 2, and quinoid dihydropteridine reductase, transcript variant 1 by TSAR1007 antibody.

[0651] FIG. 145 is protein array data showing specific binding of calcium and integrin binding 1, transcript variant b, and t-SNARE domain containing 1, transcript variant 1 by TSTO1001 antibody.

[0652] FIG. 146 is protein array data showing specific binding of HAUS augmin like complex subunit 1, transcript variant 1, and DPY30 domain containing 1, transcript variant X4 by TSTO1002 antibody.

[0653] FIG. 147 is protein array data showing specific binding of Transforming growth factor beta 3 by TSTO1003 antibody.

[0654] FIG. 148 is protein array data showing specific binding of chymotrypsinogen B2 by TSTO1004 antibody.

[0655] FIG. 149 is protein array data showing specific binding of NFKB inhibitor beta, transcript variant 1, and cyclin dependent kinase 2 associated protein 2, transcript variant 1 by TSTO1005 antibody.

[0656] FIG. 150 is protein array data showing specific binding of lipase family member N, transcript variant X1 by TSTO1006 antibody.

[0657] FIG. 151 is protein array data showing specific binding of regulator of G protein signaling 14, transcript variant 1, and leucine rich repeat containing 14, transcript variant 1 by TSTO1007 antibody.

[0658] FIG. 152 is protein array data showing specific binding of transforming growth factor beta induced by TSTO1008 antibody.

[0659] FIG. 153 is protein array data showing specific binding of BCL2 apoptosis regulator, transcript variant alpha by TSTO1010 antibody.

[0660] FIG. 154 is protein array data showing specific binding of DIX domain containing 1, transcript variant 2 by TTES1001 antibody.

[0661] FIG. 155 is protein array data showing specific binding of Caspase 8, and phosphoglucomutase 2 like 1 by TTES1002 antibody.

[0662] FIG. 156A is protein array data showing specific binding of programmed cell death 1 by TTES1003 antibody. FIG. 156B is an experimental replicate showing specific binding programmed cell death 1 by TTES1003 antibody. FIG. 156B is an experimental replicate.

[0663] FIG. 157 is protein array data showing specific binding of glyoxylate and hydroxypyruvate reductase by TTES1004 antibody.

[0664] FIG. 158 is protein array data showing specific binding of Cytochrome b5 reductase 2 by TTES1005 antibody.

[0665] FIG. 159 is protein array data showing specific binding of acyl-CoA binding domain containing 6 by TTES1006 antibody.

[0666] FIG. 160 is protein array data showing specific binding of phosducin like by TTES1007 antibody.

[0667] FIG. 161 is protein array data showing specific binding of Dexd-box helicase 52, and G protein-coupled receptor 4 by TTES1008 antibody.

[0668] FIG. 162 is protein array data showing specific binding of aarF domain containing kinase 5 by TTES1009 antibody.

[0669] FIG. 163 is protein array data showing specific binding of DIX domain containing 1, transcript variant 2 by TTES1010 antibody.

[0670] FIG. 164 is protein array data showing specific binding of Jupiter microtubule associated homolog 2 by TTES1011 antibody.

[0671] FIG. 165 is protein array data showing specific binding of G antigen 2A by TTES1012 antibody.

[0672] FIG. 166 is protein array data showing specific binding of DIX domain containing 1, transcript variant 2, and RNA polymerase II subunit E, transcript variant 1 by TTHY1001 antibody.

[0673] FIG. 167 is protein array data showing specific binding of proliferating cell nuclear antigen, transcript variant 1 by TTHY1002 antibody.

[0674] FIG. 168 is protein array data showing specific binding of BAF chromatin remodeling complex subunit BCL7C, transcript variant 2, and influenza virus NS1A binding protein by TTHY1003 antibody.

[0675] FIG. 169 is protein array data showing specific binding of cancer/testis antigen 1A by TTHY1004 antibody.

[0676] FIG. 170 is protein array data showing specific binding of cancer/testis antigen 1A by TUCE1004 antibody.

[0677] FIG. 171 is protein array data showing specific binding of UTP6 small subunit processome component by TUCE1005 antibody.

[0678] FIG. 172 is protein array data showing specific binding of cancer/testis antigen 1A by TUCS1003 antibody.

[0679] FIG. 173 is protein array data showing specific binding of RP2 activator of ARL3 GTPase by TUVM1001 antibody.

### DETAILED DESCRIPTION OF THE INVENTION

[0680] It is to be understood that this application is not limited to particular formulations or process parameters, as these may, of course, vary. It is also to be understood that the terminology used herein is for the purpose of describing particular embodiments only, and is not intended to be limiting. Further, it is understood that a number of methods and materials similar or equivalent to those described herein can be used in the practice of the present inventions.

[0681] In accordance with the present application, there may be employed conventional molecular biology, microbiology, and recombinant DNA techniques as explained fully in the art.

[0682] The following definitions supplement those in the art and are directed to the current application and are not to be imputed to any related or unrelated case, e.g., to any commonly owned patent or application. Accordingly, the terminology used herein is for the purpose of describing particular embodiments only, and is not intended to be limiting.

[0683] In this application, the use of the singular includes the plural unless specifically stated otherwise. It must be noted that, as used in the specification, the singular forms “a,” “an” and “the” include plural referents unless the context clearly dictates otherwise. Furthermore, use of the term “including” as well as other forms, such as “include”, “includes,” and “included,” is not limiting.

[0684] The terms “and/or” and “any combination thereof” and their grammatical equivalents as used herein, can be used interchangeably. These terms can convey that any combination is specifically contemplated. Solely for illustrative purposes, the following phrases “A, B, and/or C” or “A, B, C, or any combination thereof” can mean “A individually; B individually; C individually; A and B; B and C; A and C; and A, B, and C.”

[0685] The term “or” can be used conjunctively or disjunctively, unless the context specifically refers to a disjunctive use.

[0686] The term “about” or “approximately” means within an acceptable error range for the particular value as determined by one of ordinary skill in the art, which will depend in part on how the value is measured or determined, i.e., the limitations of the measurement system. For example, “about” can mean within 1 or more than 1 standard deviation, per the practice in the art. Alternatively, “about” can mean a range of up to 20%, up to 10%, up to 5%, or up to 1% of a given value. Alternatively, particularly with respect to biological systems or processes, the term can mean within an order of magnitude, preferably within 5-fold, and more preferably within 2-fold, of a value. Where particular values are described in the application and claims, unless otherwise stated the term “about” meaning within an acceptable error range for the particular value should be assumed.

[0687] As used in this specification and claim(s), the words “comprising” (and any form of comprising, such as “comprise” and “comprises”), “having” (and any form of having, such as “have” and “has”), “including” (and any form of including, such as “includes” and “include”) or “containing” (and any form of containing, such as “contains” and “contain”) are inclusive or open-ended and do not exclude additional, unrecited elements or method steps. It is contemplated that any embodiment discussed in this specification can be implemented with respect to any method or composition of the invention, and vice versa. Furthermore, compositions of the invention can be used to achieve methods of the invention.

[0688] As used herein the term “consisting essentially of” refers to those elements required for a given embodiment. The term permits the presence of elements that do not materially affect the basic and novel or functional characteristic(s) of that embodiment of the invention.

[0689] As used herein the term “consisting of” refers to compositions, methods, and respective components thereof as described herein, which are exclusive of any element not recited in that description of the embodiment.

[0690] Reference in the specification to “some embodiments,” “an embodiment,” “one embodiment” or “other embodiments” means that a particular feature, structure, or characteristic described in connection with the embodiments is included in at least some embodiments, but not necessarily all embodiments, of the inventions.

[0691] As used herein, the terms “protein”, “peptide” and “polypeptide” are used interchangeably to designate a series of amino acid residues connected to each other by peptide bonds between the alpha-amino and carboxy groups of adjacent residues. The terms “protein”, “peptide” and “polypeptide” refer to a polymer of amino acids, including modified amino acids (e.g., phosphorylated, glycated, glycosylated, etc.) and amino acid analogs, regardless of its size or function. “Protein” and “polypeptide” are often used in reference to relatively large polypeptides, whereas the term “peptide” is often used in reference to small polypeptides, but usage of these terms in the art overlaps. The terms “protein”, “peptide” and “polypeptide” are used interchangeably herein when referring to a gene product and fragments thereof. These terms encompass, e.g., native and artificial proteins, protein fragments and polypeptide analogs (such as muteins, variants, and fusion proteins) of a protein sequence as well as post-translationally, or otherwise covalently or non-covalently, modified proteins. A peptide, polypeptide, or protein may be monomeric or polymeric. A polypeptide can have the amino acid sequence of naturally occurring polypeptide from any mammal. Such native sequence polypeptide can be isolated from nature or can be produced by recombinant or synthetic means. In some embodiments, the polypeptide is a “variant”. “Variant” means a biologically active polypeptide having at least about 80% amino acid sequence identity with the native sequence polypeptide after aligning the sequences and introducing gaps, if necessary, to achieve the maximum percent sequence identity, and not considering any conservative substitutions as part of the sequence identity. Such variants include, for instance, polypeptides wherein one or more amino acid residues are added, or deleted, at the N- or C-terminus of the polypeptide. In some embodiments, a variant will have at least about 80% amino acid sequence identity. In some embodiments, a variant will have at least about 90% amino acid sequence identity. In some embodiments, a variant will have at least about 95% amino acid sequence identity with the native sequence polypeptide. A “derivative” of a polypeptide is a polypeptide (e.g., an antibody) that has been chemically modified, e.g., via conjugation to another chemical moiety (such as, for example, polyethylene glycol or albumin, e.g., human serum albumin), phosphorylation, and glycosylation

[0692] The term “fusion protein” as used herein refers to a polypeptide that comprises an amino acid sequence of an antibody or fragment thereof and an amino acid sequence of a heterologous polypeptide (i.e., an unrelated polypeptide).

[0693] The terms “synthetic polynucleotide,” “synthetic gene” or “synthetic polypeptide,” as used herein, mean that the corresponding polynucleotide sequence or portion thereof, or amino acid sequence or portion thereof, is derived, from a sequence that has been designed, or synthesized de novo, or modified, compared to an equivalent naturally-occurring sequence. Synthetic polynucleotides (antibodies or antigen-binding fragments) or synthetic genes can be prepared by methods known in the art, including but not limited to, the chemical synthesis of nucleic acid or amino acid sequences. Synthetic genes are typically different from naturally-occurring genes, either at the amino acid, or polynucleotide level, (or both) and are typically located within the context of synthetic expression control sequences. Synthetic gene polynucleotide sequences, may not necessarily encode proteins with different amino acids, compared to the natural gene; for example, they can also encompass synthetic polynucleotide sequences that incorporate different codons but which encode the same amino acid (i.e., the nucleotide changes represent silent mutations at the amino acid level).

[0694] Percent (%) sequence identity with respect to a reference polypeptide sequence is the percentage of amino acid residues in a candidate sequence that are identical with the amino acid residues in the reference polypeptide sequence, after aligning the sequences and introducing gaps, if necessary, to achieve the maximum percent sequence identity, and not considering any conservative substitutions as part of the sequence identity. Alignment for purposes of determining percent amino acid sequence identity can be achieved in various ways that are within the skill in the art, for instance, using publicly available computer software such as BLAST, BLAST-2, ALIGN or Megalign (DNASTAR®) software. Those skilled in the art can determine appropriate parameters for aligning sequences, including any algorithms needed to achieve maximal alignment over the full length of the sequences being compared. For purposes herein, however, % amino acid sequence identity values are generated using the sequence comparison computer program ALIGN-2. The ALIGN-2 sequence comparison computer program was authored by Genentech, Inc., and the source code has been filed with user documentation in the U.S. Copyright Office, Washington D.C., 20559, where it is registered under U.S. Copyright Registration No. TXU510087. The ALIGN-2 program is publicly available from Genentech, Inc., South San Francisco, Calif, or may be compiled from the source code. The ALIGN-2 program should be compiled for use on a UNIX operating system, including digital UNIX V4.0D. All sequence comparison parameters are set by the ALIGN-2 program and do not vary.

[0695] In situations where ALIGN-2 is employed for amino acid sequence comparisons, the % amino acid sequence identity of a given amino acid sequence A to, with, or against a given amino acid sequence B (which can alternatively be phrased as a given amino acid sequence A that has or comprises a certain % amino acid sequence identity to, with, or against a given amino acid sequence B) is calculated as follows: 100 times the fraction X/Y, where X is the number of amino acid residues scored as identical matches by the sequence alignment program ALIGN-2 in that program's alignment of A and B, and where Y is the total number of amino acid residues in B. It will be appreciated that where the length of amino acid sequence A is not equal to the length of amino acid sequence B, the % amino acid sequence identity of A to B will not equal the % amino acid sequence identity of B to A. Unless specifically stated otherwise, all % amino acid sequence identity values used herein are obtained as described in the immediately preceding paragraph using the ALIGN-2 computer program.

### Antibody Terminology

[0696] As used herein, the term “antibody” refers to an immunoglobulin (Ig) whether natural or partly or wholly synthetically produced. The term also covers any polypeptide or protein having a binding domain which is, or is homologous to, an antigen-binding domain. The term further includes “antigen-binding fragments” and other interchangeable terms for similar binding fragments such as described below.

[0697] An antibody includes, but is not be limited to, any specific binding member, immunoglobulin class and/or isotype (e.g., IgG1, IgG2, IgG3, IgG4, IgM, IgA, IgD, IgE and IgM); and biologically relevant fragment or specific binding member thereof. Thus, an antibody includes, for example, monoclonal antibodies, chimeric antibodies, humanized antibodies, human antibodies, recombinant antibodies, chemically engineered antibodies, deimmunized antibodies, affinity-matured antibodies, multispecific antibodies (for example, bispecific antibodies and polyreactive antibodies), heteroconjugate antibodies, antibody fragments, and combinations thereof (e.g., a monoclonal antibody that is also deimmunized, a humanized antibody that is also deimmunized, etc.).

[0698] The present disclosure provides cancer associated antibodies that find use in treating and/or diagnosing cancer. The term “cancer associated antibody” as used herein refers to an antibody specific for a cancer associated antigen. In some embodiments, the cancer associated antibody comprises at least one antigen-binding region specific for a cancer associated antigen. Disclosed herein are the complete reconstructed nucleic acid consensus sequences and complete reconstructed polypeptide consensus sequences of the variable heavy chain (VH) and variable light chain (VL) of the antibodies. The nucleic acid and polypeptide sequences of the CDR3 of the VH and the VL are also provided.

[0699] Native antibodies and native immunoglobulins are usually heterotetrameric glycoproteins of about 150,000 Daltons, composed of two identical light (L) chains and two identical heavy (H) chains. Each light chain is typically linked to a heavy chain by one covalent disulfide bond, while the number of disulfide linkages varies among the heavy chains of different immunoglobulin isotypes. Each heavy and light chain also has regularly spaced intrachain disulfide bridges. Each heavy chain has at one end a variable domain (“VH”) followed by a number of constant domains (“CH”). Each light chain has a variable domain at one end (“VL”) and a constant domain (“CL”) at its other end; the constant domain of the light chain is aligned with the first constant domain of the heavy chain, and the light-chain variable domain is aligned with the variable domain of the heavy chain. Particular amino acid residues are believed to form an interface between the light- and heavy-chain variable domains.

[0700] The antibodies or antigen-binding fragment thereof of the present disclosure can comprise a deletion at an end of a light chain. The antibodies or antigen-binding fragment thereof of the invention can comprise a deletion of 3 or more amino acids at an end of the light chain. The antibodies or antigen-binding fragment thereof of the invention can comprise a deletion of 7 or less amino acids at an end of the light chain. The antibodies or antigen-binding fragment thereof of the invention can comprise a deletion of 3, 4, 5, 6, or 7 amino acids at an end of the light chain.

[0701] The antibodies or antigen-binding fragment thereof of the present disclosure can comprise an insertion in a light chain. The antibodies or antigen-binding fragment thereof of the invention can comprise an insertion of 1, 2, 3, 4, 5, 6, 7, 8, 9, or 10, or more amino acids in the light chain. The antibodies or antigen-binding fragment thereof of the invention can comprise an insertion of 3 amino acids in the light chain.

[0702] As used herein, “monoclonal antibody” refers to an antibody obtained from a population of substantially homogeneous antibodies, i.e., the individual antibodies comprising the population are identical except for possible naturally-occurring mutations that may be present in minor amounts. Monoclonal antibodies are highly specific, being directed against a single antigenic site. Furthermore, in contrast to polyclonal antibody preparations, which typically include different antibodies directed against different determinants (epitopes), each monoclonal antibody is directed against a single determinant on the antigen. The modifier “monoclonal” indicates the character of the antibody as being obtained from a substantially homogeneous population of antibodies and is not to be construed as requiring production of the antibody by any particular method. For example, the monoclonal antibodies to be used in accordance with the present invention may be made by the hybridoma method first described by Kohler and Milstein, 1975, Nature, 256:495, or may be made by recombinant DNA methods. The monoclonal antibodies may also be isolated from phage libraries generated using the techniques described in McCafferty et al., 1990, Nature, 348:552-554, for example.

[0703] As used herein, “humanized” antibodies refer to forms of non-human (e.g. murine) antibodies that are specific chimeric immunoglobulins, immunoglobulin chains, or fragments thereof (such as Fv, Fab, Fab′, F(ab′)2 or other antigen-binding subsequences of antibodies) that contain minimal sequence derived from non-human immunoglobulin. For the most part, humanized antibodies are human immunoglobulins (recipient antibody) in which residues from a complementary determining region (CDR) of the recipient are replaced by residues from a CDR of a non-human species (donor antibody) such as mouse, rat, or rabbit having the desired specificity, affinity, and capacity. In some instances, Fv framework region (FR) residues of the human immunoglobulin are replaced by corresponding non-human residues. Furthermore, the humanized antibody may comprise residues that are found neither in the recipient antibody nor in the imported CDR or framework sequences but are included to further refine and optimize antibody performance. In general, the humanized antibody will comprise substantially all of at least one, and typically two, variable domains, in which all or substantially all of the CDR regions correspond to those of a non-human immunoglobulin and all or substantially all of the FR regions are those of a human immunoglobulin consensus sequence. The humanized antibody optimally also will comprise at least a portion of an immunoglobulin constant region or domain (Fc), typically that of a human immunoglobulin. Other forms of humanized antibodies have one or more CDRs (one, two, three, four, five, six) which are altered with respect to the original antibody, which are also termed one or more CDRs “derived from” one or more CDRs from the original antibody.

[0704] As used herein, an “isolated antibody” is one that has been separated and/or recovered from a component of its natural environment. Contaminant components of its natural environment are materials that would interfere with diagnostic or therapeutic uses of the antibody, and may include enzymes, hormones, and other proteinaceous or non-proteinaceous components. In preferred embodiments, the antibody is purified: (1) to greater than 95% by weight of antibody as determined by the Lowry method, and most preferably more than 99% by weight; (2) to a degree sufficient to obtain at least 15 residues of N-terminal or internal amino acid sequence by use of a spinning cup sequenator; or (3) to homogeneity as shown by SDS-PAGE under reducing or non-reducing conditions and using Coomassie blue or, preferably, silver staining. Isolated antibody includes the antibody in situ within recombinant cells since at least one component of the antibody's natural environment will not be present. Ordinarily, however, isolated antibody will be prepared by at least one purification step.

[0705] As used herein, the term “Complementarity Determining Regions” (CDRs, i.e., CDR1, CDR2, and CDR3) refers to the amino acid residues of an antibody variable domain the presence of which are necessary for antigen binding. Each variable domain typically has three CDR regions identified as CDR1, CDR2 and CDR3. The CDRs of variable heavy chain can be CDR-H1, CDR-H2 and CDR-H3. The CDRs of variable light chain can be CDR-L1, CDR-L2 and CDR-L3. Exemplary hypervariable loops occur at amino acid residues 26-32 (L1), 50-52 (L2), 91-96 (L3), 26-32 (H1), 53-55 (H2), and 96-101 (H3). (Chothia and Lesk, J. Mol. Biol. 196:901-917 (1987)). Exemplary CDRs (CDR-L1, CDR-L2, CDR-L3, CDR-H1, CDR-H2, and CDR-H3) occur at amino acid residues 24-34 of L1, 50-56 of L2, 89-97 of L3, 31-35B of H1, 50-65 of H2, and 95-102 of H3 (Kabat et al., Sequences of Proteins of Immunological Interest, 5th ed. (1991)). Thus, the HVs may be comprised within the corresponding CDRs and references herein to the “hypervariable loops” of VH and VL domains should be interpreted as also encompassing the corresponding CDRs, and vice versa, unless otherwise indicated. The more highly conserved regions of variable domains are called the framework region (FR), as defined below. The variable domains of native heavy and light chains each comprise four FRs (FR1, FR2, FR3 and FR4, respectively), largely adopting a [beta]-sheet configuration, connected by the three hypervariable loops. The hypervariable loops in each chain are held together in close proximity by the FRs and, with the hypervariable loops from the other chain, contribute to the formation of the antigen-binding site of antibodies. Structural analysis of antibodies revealed the relationship between the sequence and the shape of the binding site formed by the complementarity determining regions (Chothia et al., J. Mol. Biol. 227: 799-817 (1992)); Tramontano et al., J. Mol. Biol, 215: 175-182 (1990)). Despite their high sequence variability, five of the six loops adopt just a small repertoire of main-chain conformations, called “canonical structures”. These conformations are first of all determined by the length of the loops and secondly by the presence of key residues at certain positions in the loops and in the framework regions that determine the conformation through their packing, hydrogen bonding or the ability to assume unusual main-chain conformations.

[0706] A “variable region” of an antibody refers to the variable region of the antibody light chain or the variable region of the antibody heavy chain, either alone or in combination. The variable regions of the heavy and light chain each consist of four framework regions (FR) connected by three complementarity determining regions (CDRs) also known as hypervariable regions. The CDRs in each chain are held together in close proximity by the FRs and, with the CDRs from the other chain, contribute to the formation of the antigen-binding site of antibodies. There are at least two techniques for determining CDRs: (1) an approach based on cross-species sequence variability (i.e., Kabat et al. Sequences of Proteins of Immunological Interest, (5th ed., 1991, National Institutes of Health, Bethesda Md.)); and (2) an approach based on crystallographic studies of antigen-antibody complexes (Allazikani et al. (1997) J. Molec. Biol. 273:927-948)). A CDR may refer to CDRs defined by either approach or by a combination of both approaches.

[0707] A “constant region” of an antibody refers to the constant region of the antibody light chain or the constant region of the antibody heavy chain, either alone or in combination. The constant region does not vary with respect to antigen specificity.

[0708] As used herein, the term “heavy chain region” includes amino acid sequences derived from the constant domains of an immunoglobulin heavy chain. A polypeptide comprising a heavy chain region comprises at least one of: a CH1 domain, a hinge (e.g., upper, middle, and/or lower hinge region) domain, a CH2 domain, a CH3 domain, or a variant or fragment thereof. In an embodiment, an antibody or an antigen-binding fragment thereof may comprise the Fc region of an immunoglobulin heavy chain (e.g., a hinge portion, a CH2 domain, and a CH3 domain). In another embodiment, an antibody or an antigen-binding fragment thereof lacks at least a region of a constant domain (e.g., all or part of a CH2 domain). In certain embodiments, at least one, and preferably all, of the constant domains are derived from a human immunoglobulin heavy chain. For example, in one preferred embodiment, the heavy chain region comprises a fully human hinge domain. In other preferred embodiments, the heavy chain region comprising a fully human Fc region (e.g., hinge, CH2 and CH3 domain sequences from a human immunoglobulin). In certain embodiments, the constituent constant domains of the heavy chain region are from different immunoglobulin molecules. For example, a heavy chain region of a polypeptide may comprise a domain derived from an IgG1 molecule and a hinge region derived from an IgG3 or IgG4 molecule. In other embodiments, the constant domains are chimeric domains comprising regions of different immunoglobulin molecules. For example, a hinge may comprise a first region from an IgG1 molecule and a second region from an IgG3 or IgG4 molecule. As set forth above, it will be understood by one of ordinary skill in the art that the constant domains of the heavy chain region may be modified such that they vary in amino acid sequence from the naturally occurring (wild-type) immunoglobulin molecule. That is, the polypeptides of the invention disclosed herein may comprise alterations or modifications to one or more of the heavy chain constant domains (CH1, hinge, CH2 or CH3) and/or to the light chain constant domain (CL). Exemplary modifications include additions, deletions or substitutions of one or more amino acids in one or more domains.

[0709] The antibodies or antigen-binding fragment thereof of the present disclosure can comprise a CDR3 region that is a length of at least about 10, 11, 12, 13, 14, 15, 16, 17, 18, 19, 20, 21, 22, 23, 24, 25, 26, 27, 28, 29, or 30 amino acids in length. The antibodies or antigen-binding fragment thereof of the present disclosure can comprise a CDR3 region that is at least about 18 amino acids in length. In some embodiments, the CDR3 region comprises a CDR-H3 region. In some embodiments, the CDR3 region comprises a CDR-L3 region.

[0710] As used herein, the term “hinge region” includes the region of a heavy chain molecule that joins the CH1 domain to the CH2 domain. This hinge region comprises approximately 25 residues and is flexible, thus allowing the two N-terminal antigen-binding regions to move independently. Hinge regions can be subdivided into three distinct domains: upper, middle, and lower hinge domains (Roux et al. J. Immunol. 1998 161:4083).

[0711] As used herein, the term “Fv” is the minimum antibody fragment that contains a complete antigen-recognition and -binding site. This fragment consists of a dimer of one heavy- and one light-chain variable region domain in tight, non-covalent association.

[0712] “Heavy chain variable region” or “VH” with regard to an antibody refers to the fragment of the heavy chain that contains three CDRs interposed between flanking stretches known as framework regions, these framework regions are generally more highly conserved than the CDRs and form a scaffold to support the CDRs.

[0713] Six hypervariable loops (three loops each from the H and L chain) contribute the amino acid residues for antigen-binding and confer antigen-binding specificity to the antibody. However, even a single variable domain (or half of an Fv comprising only three CDRs specific for an antigen) has the ability to recognize and bind antigen, although at a lower affinity than the entire binding site.

[0714] “Framework” or FR residues are those variable domain residues other than the hypervariable region residues.

[0715] It is understood in the art that an antibody is a glycoprotein having at least two heavy (H) chains and two light (L) chains interconnected by disulfide bonds, or an antigen-binding portion thereof. A heavy chain is comprised of a heavy chain variable region (VH) and a heavy chain constant region (CH1, CH2 and CH3). A light chain is comprised of a light chain variable region (VL) and a light chain constant region (CL). The variable regions of both the heavy and light chains comprise framework regions (FRs or FWRs) and hypervariable regions (HVRs). The HVRs are the amino acid residues of an antibody that are responsible for antigen binding. The hypervariable region generally comprises amino acid residues from a complementarity determining region (CDR), which have the highest sequence variability and/or involved in antigen recognition. With the exception of CDR1 in VH, CDRs generally comprise the amino acid residues that form the hypervariable loops. CDRs also comprise “specificity determining residues,” or “SDRs,” which are residues that contact antigen. SDRs are contained within regions of the CDRs called abbreviated-CDRs, or a-CDRs. Exemplary a-CDRs (a-CDR-L1, a-CDR-L2, a-CDR-L3, a-CDR-H1, a-CDR-H2, and a-CDR-H3) occur at amino acid residues 31-34 of L1, 50-55 of L2, 89-96 of L3, 31-35B of H1, 50-58 of H2, and 95-102 of H3. (See, e.g., Fransson, Front. Biosci. 13:1619-1633 (2008).)

[0716] Unless otherwise indicated, HVR residues and other residues in the variable domain (e.g., FR residues) are numbered herein according to Kabat et al., supra. A variable region is a domain of an antibody heavy or light chain that is involved in binding the antibody to antigen. (See, e.g., Kindt et al. Kuby Immunology, 6th ed., W.H. Freeman and Co., p. 91 (2007)). A single VH or VL domain may be sufficient to confer antigen-binding specificity. Furthermore, antibodies that bind a particular antigen may be isolated using a VH or VL domain from an antibody that binds the antigen to screen a library of complementary VL or VH domains, respectively. (See, e.g., Portolano et al., J. Immunol. 150:880-887 (1993); Clarkson et al., Nature 352:624-628 (1991)). The four FWR regions are typically more conserved while CDR regions (CDR1, CDR2 and CDR3) represent hypervariable regions and are arranged from NH2 terminus to the COOH terminus as follows: FWR1, CDR1, FWR2, CDR2, FWR3, CDR3, and FWR4. The variable regions of the heavy and light chains contain a binding domain that interacts with an antigen while, depending of the isotype, the constant region(s) may mediate the binding of the immunoglobulin to host tissues or factors. An antibody also includes chimeric antibodies, humanized antibodies, and recombinant antibodies, human antibodies generated from a transgenic non-human animal, as well as antibodies selected from libraries using enrichment technologies available to the artisan.

[0717] The term “antibody heavy chain,” refers to the larger of the two types of polypeptide chains present in antibody molecules in their naturally occurring conformations, and which normally determines the class to which the antibody belongs.

[0718] The term “antibody light chain,” refers to the smaller of the two types of polypeptide chains present in antibody molecules in their naturally occurring conformations. Kappa (“K”) and lambda (“X”) light chains refer to the two major antibody light chain isotypes.

[0719] An antibody or antigen-binding fragment thereof “specifically binds” or “preferentially binds” to a target if it binds with greater affinity and/or avidity than it binds to epitopes on unrelated polypeptides. The specificity of an antibody or antigen-binding fragment or portion thereof can be determined based on affinity and/or avidity. Methods to determine such specific binding are also well known in the art. According to certain embodiments of the present disclosure, the antibodies or antigen-binding fragment thereof can bind to a human cancer antigen but not to a cancer antigen from other species. Alternatively, the antibodies or antigen-binding fragment thereof, in certain embodiments, bind to human cancer antigen and to cancer antigen from one or more non-human species. For example, the antibodies or antigen-binding fragment thereof can bind to human cancer antigen and can bind or not bind, as the case may be, to one or more of mouse, rat, guinea pig, hamster, gerbil, pig, cat, dog, rabbit, goat, sheep, cow, horse, camel, cynomologous, marmoset, rhesus or chimpanzee cancer antigen.

[0720] The affinity, represented by the equilibrium constant for the dissociation (K_{D}) of an antigen with an antigen-binding protein, is a measure for the binding strength between an antigenic determinant and an antigen-binding site on the antigen-binding protein: the lesser the value of the K_{D}, the stronger the binding strength between an antigenic determinant and the antigen-binding molecule. Alternatively, the affinity can also be expressed as the affinity constant (K_{A}), which is 1/K_{D}). Unless indicated otherwise, as used herein, “binding affinity” refers to intrinsic binding affinity which reflects a 1:1 interaction between members of a binding pair (e.g., antibody and antigen). As will be clear to the skilled person, affinity can be determined in a manner known per se, depending on the specific antigen of interest. Accordingly, an antibody or antigen-binding fragment thereof as defined herein is said to be “specific for” a first target or antigen compared to a second target or antigen when it binds to the first antigen with an affinity (as described above, and suitably expressed, for example as a K_{D} value) that is at least 50 times, such as at least 100 times, and preferably at least 1000 times, and up to 10,000 times or more better than the affinity with which said amino acid sequence or polypeptide binds to another target or polypeptide. Preferably, when an antibody or antigen-binding fragment thereof is “specific for” a target or antigen, compared to another target or antigen, it can bind the target or antigen, but does not bind the other target or antigen. However, as understood by one of ordinary skill in the art, in some embodiments, where a binding site on a target is shared or partially shared by multiple, different ligands, an antibody or antigen-binding fragment thereof can specifically bind to a target, such as cancer associated antigen, and have the functional effect of, for example, inhibiting/preventing tumor progression.

[0721] In some embodiments, an antibody provided herein has a dissociation constant (K_{D}) of about 1 M, 100 nM, 10 nM, 5 nM, 2 nM, 1 nM, 0.5 nM, 0.1 nM, 0.05 nM, 0.01 nM, or 0.001 nM or less (e.g., 10⁻⁸ M or less, e.g., from 10⁻⁸ M to 10⁻¹³ M, e.g., from 10⁻⁹ M to 10⁻¹³ M). Another aspect of the invention provides for an antibody or antigen-binding fragment thereof with an increased affinity for its target, for example, an affinity matured antibody. An affinity matured antibody is an antibody with one or more alterations in one or more hypervariable regions (HVRs), compared to a parent antibody which does not possess such alterations, such alterations resulting in an improvement in the affinity of the antibody for antigen. These antibodies can bind to antigen with a K_{D} of about 5×10⁻⁹ M, 2×10⁻⁹ M, 1×10⁻⁹ M, 5×10⁻⁹ M, 2×10⁻⁹ M, 10×10⁻¹⁰ M, 5×10⁻¹¹ M, 1×10⁻¹¹ M, 5×10⁻¹² M, 1×10⁻¹² M, or less. In some embodiments, the present disclosure provides an antibody or antigen-binding fragment thereof which has an increased affinity of at least 1.5 fold, 2 fold, 2.5 fold, 3 fold, 4 fold, 5 fold, 10 fold, 20 fold or greater as compared to a germline antibody containing the heavy chain sequence and light chain sequence, or both. In other embodiments, an antibody is provided that competes for binding to the same epitope as an antibody as described herein. In some embodiments, the antibody or antigen-binding fragment thereof that binds to the same epitope, and/or competes for binding to the same epitope as an antibody exhibits effector function activities, such as, for example, Fc-mediated cellular cytotoxicity, including ADCC activity.

[0722] KD can be measured by any suitable assay. For example, KD can be measured by a radiolabeled antigen-binding assay (RIA) (See, e.g., Chen et al., J. Mol. Biol. 293:865-881 (1999); Presta et al., Cancer Res. 57:4593-4599 (1997)). For example, KD can be measured using a surface plasmon resonance assay (e.g., using a BIACORE®-2000 or a BIACORE®-3000). For example, KD can be measured using a competitive ELISA.

[0723] Avidity is the measure of the strength of binding between an antigen-binding molecule and the pertinent antigen. Avidity is related to both the affinity between an antigenic determinant and its antigen binding site on the antigen-binding molecule, and the number of pertinent binding sites present on the antigen-binding molecule. Typically, antigen-binding proteins will bind to their cognate or specific antigen with a dissociation constant (K_{D} of 10⁻⁵ to 10⁻¹² moles/liter or less, and preferably 10⁻⁷ to 10⁻¹² moles/liter or less and more preferably 10-8 to 10-12 moles/liter (i.e. with an association constant (K_{A}) of 10⁵ to 10¹² liter/moles or more, and preferably 10⁷ to 10¹² liter/moles or more and more preferably 10⁸ to 10¹² liter/moles). Any K_{D} value greater than 10⁻⁴ mol/liter (or any K_{A} value lower than 104 M⁻¹) is generally considered to indicate non-specific binding. The K_{D} for biological interactions which are considered meaningful (e.g., specific) are typically in the range of 10⁻¹⁰ M (0.1 nM) to 10⁻⁵ M (10000 nM). The stronger an interaction is, the lower is its K_{D}. Preferably, a binding site on an anti-LAP antibody or antigen-binding fragment thereof described herein will bind with an affinity less than 500 nM, preferably less than 200 nM, more preferably less than 10 nM, such as less than 500 pM. Specific binding of an antigen-binding protein to an antigen or antigenic determinant can be determined in any suitable manner known per se, including, for example, Scatchard analysis and/or competitive binding assays, such as radioimmunoassays (RIA), enzyme immunoassays (EIA) and sandwich competition assays, and the different variants thereof known per se in the art; as well as other techniques as mentioned herein.

[0724] The term “kon”, as used herein, is intended to refer to the rate constant for association of an antibody or antigen-binding fragment thereof to an antigen.

[0725] The term “Koff”, as used herein, is intended to refer to the rate constant for dissociation of an antibody or antigen-binding fragment thereof from the antibody/antigen complex.

[0726] In the context of an antibody or antigen-binding fragment thereof, the term “specificity” or “specific for” refers to the number of different types of antigens or antigenic determinants to which a particular antibody or antigen-binding fragment thereof can bind. The specificity of an antibody or antigen-binding fragment or portion thereof can be determined based on affinity and/or avidity. The affinity, represented by the equilibrium constant for the dissociation (KD) of an antigen with an antigen-binding protein, is a measure for the binding strength between an antigenic determinant and an antigen-binding site on the antigen-binding protein: the lesser the value of the KD, the stronger the binding strength between an antigenic determinant and the antigen-binding molecule. Alternatively, the affinity can also be expressed as the affinity constant (KA), which is 1/KD). As will be clear to the skilled person, affinity can be determined in a manner known per se, depending on the specific antigen of interest. Accordingly, an antibody or antigen-binding fragment thereof as defined herein is said to be “specific for” a first target or antigen compared to a second target or antigen when it binds to the first antigen with an affinity (as described above, and suitably expressed, for example as a KD value) that is at least 50 times, such as at least 100 times, and preferably at least 1000 times, and up to 10,000 times or more better than the affinity with which said amino acid sequence or polypeptide binds to another target or polypeptide. Preferably, when an antibody or antigen-binding fragment thereof is “specific for” a target or antigen, compared to another target or antigen, it can bind the target or antigen, but does not bind the other target or antigen.

[0727] However, as understood by one of ordinary skill in the art, in some embodiments, where a binding site on a target is shared or partially shared by multiple, different ligands, an antibody or antigen binding fragment thereof can specifically bind to a target, such as cancer associated antigen, and have the functional effect of, for example, inhibiting/preventing tumor progression.

[0728] The term “fusion protein” as used herein refers to a polypeptide that comprises an amino acid sequence of an antibody or fragment thereof and an amino acid sequence of a heterologous polypeptide (i.e., an unrelated polypeptide).

[0729] While preferred embodiments of the present invention have been shown and described herein, it will be obvious to those skilled in the art that such embodiments are provided by way of example only. Numerous variations, changes, and substitutions will now occur to those skilled in the art without departing from the invention. It should be understood that various alternatives to the embodiments of the invention described herein may be employed in practicing the invention. It is intended that the following claims define the scope of the invention and that methods and structures within the scope of these claims and their equivalents be covered thereby.

[0730] In some embodiments, the antibody or antigen binding fragment thereof of the present disclosure is is a single domain antibody. The expression “single domain antibody” (sdAbs) or “single variable domain (SVD) antibody” generally refers to a single variable region (VH or ′) wherein the antibody-antigen binding can be imparted. In other words, single variable domain does not need to recognize the target antigen by interacting with another variable region. A single domain antibody monomers single arm antigen binding by each antibody variable region (VH*VJ composition. Examples of single domain antibodies include those derived from camelids (camels and llamas) and cartilaginous fish (e.g. nurse sharks) antibodies and those antibodies (Ward et al from human and mouse antibodies by recombinant methods, Nature (1989) 341: 544-546; Dooley and Flajnik, Dev Comp Immunol (2006) 30: 43-56; Muyldermans et, TrendBiochem Sci (2001) 26: 230-235; Holt et, Trends Biotechnol (2003): 21: 484-490; WO 2005/035572; TO 03/035694; Davies and Riechmann, Febs Lett (1994) 339: 285-290; W000/29 004;. WO 02/051870) and a single variable region of an antibody can be other than a single domain antibody variable regions or variable domains are present in an antigen binding arm (e.g., homo- or hetero-multimer together).

### Monoclonal Antibodies

[0731] A monoclonal antibody is obtained from a population of substantially homogeneous antibodies, i.e., the individual antibodies comprising the population are identical except for possible naturally occurring mutations that may be present in minor amounts.

[0732] In some embodiments, the antibodies of the present disclosure are monoclonal. Monoclonal antibodies may be made using the hybridoma method first described by Kohler et al., Nature, 256:495 (1975), or may be made by recombinant DNA methods.

[0733] In the hybridoma method, a mouse or other appropriate host animal, such as a hamster or macaque monkey, is immunized as herein described to elicit lymphocytes that produce or are capable of producing antibodies that will specifically bind to the protein used for immunization. Alternatively, lymphocytes may be immunized in vitro. Lymphocytes then are fused with myeloma cells using a suitable fusing agent, such as polyethylene glycol, to form a hybridoma cell (Goding, Monoclonal Antibodies: Principles and Practice, pp. 59-103 (Academic Press, 1986)).

[0734] The hybridoma cells thus prepared are seeded and grown in a suitable culture medium that preferably contains one or more substances that inhibit the growth or survival of the unfused, parental myeloma cells. For example, if the parental myeloma cells lack the enzyme hypoxanthine guanine phosphoribosyl transferase (HGPRT or HPRT), the culture medium for the hybridomas typically will include hypoxanthine, aminopterin, and thymidine (HAT medium), which substances prevent the growth of HGPRT-deficient cells. Preferred myeloma cells are those that fuse efficiently, support stable high-level production of antibody by the selected antibody-producing cells, and are sensitive to a medium. Human myeloma and mouse-human heteromyeloma cell lines also have been described for the production of human monoclonal antibodies (Kozbor, J. Immunol., 133: 3001 (1984); Brodeur et al., Monoclonal Antibody Production Techniques and Applications, pp. 51-63 (Marcel Dekker, Inc., New York, 1987)). Exemplary murine myeloma lines include those derived from MOP-21 and M.C.-11 mouse tumors available from the Salk Institute Cell Distribution Center, San Diego, Calif USA, and SP-2 or X63-Ag8-653 cells available from the American Type Culture Collection, Rockville, Md. USA. Culture medium in which hybridoma cells are growing is assayed for production of monoclonal antibodies directed against the antigen. Accordingly, in one aspect the present disclosure provides a hybridoma producing the antibody or antigen-binding fragment thereof, described herein. Preferably, the binding specificity of monoclonal antibodies produced by hybridoma cells is determined by immunoprecipitation or by an in vitro binding assay, such as radioimmunoassay (RIA) or enzyme-linked immunoabsorbent assay (ELISA). The binding affinity of the monoclonal antibody can, for example, be determined by Scatchard analysis (Munson et al., Anal. Biochem., 107:220 (1980)).

[0735] After hybridoma cells are identified that produce antibodies of the desired specificity, affinity, and/or activity, the clones may be subcloned by limiting dilution procedures and grown by standard methods (Goding, Monoclonal Anti-bodies: Principles and Practice, pp. 59-103 (Academic Press, 1986)). Suitable culture media for this purpose include, for example, D-MEM or RPMI-1640 medium. In addition, the hybridoma cells may be grown in vivo as ascites tumors in an animal. The monoclonal antibodies secreted by the subclones are suitably separated from the culture medium, ascites fluid, or serum by conventional immunoglobulin purification procedures such as, for example, protein A-Sepharose, hydroxylapatite chromatography, gel electrophoresis, dialysis, or affinity chromatography.

### Chimeric Antibodies

[0736] In some embodiments, an antibody provided herein is a chimeric. A chimeric antibody is an antibody in which a portion of the heavy and/or light chain is derived from a particular source or species, while the remainder of the heavy and/or light chain is derived from a different source or species. In one example, a chimeric antibody comprises a non-human variable region (e.g., a variable region derived from a mouse, rat, hamster, rabbit, or non-human primate, such as a monkey) and a human constant region. In a further example, a chimeric antibody is a “class switched” antibody in which the class or subclass has been changed from that of the parent antibody. Chimeric antibodies include antigen-binding fragments thereof. For details, see, for example, Jones et al., Nature 321: 522-525 (1986); Reichmann et al., Nature 332: 323-329 (1988); Presta, Curr. Op. Struct. Biol., 2: 593-596 (1992); and Morrison et al., Proc. Natl. Acad. Sci. USA, 81:6851-6855 (1984).

### Humanized Antibodies

[0737] In some embodiments, an antibody provided herein is a humanized antibody. In one embodiment, a humanized antibody is an antibody comprising amino acid residues from non-human HVRs and amino acid residues from human FRs. In certain embodiments, a humanized antibody will comprise substantially all of at least one, and typically two, variable domains, in which all or substantially all of the HVRs (e.g., CDRs) correspond to those of a non-human antibody, and all or substantially all of the FRs correspond to those of a human antibody. A humanized antibody optionally may comprise at least a portion of an antibody constant region derived from a human antibody. See, e.g., Almagro and Fransson, Front. Biosci. 13:1619-1633 (2008); Riechmann et al., Nature 332:323-329 (1988); Queen et al., Proc. Nat'l Acad. Sci. USA 86:10029-10033 (1989); Kashmiri et al., Methods 36:25-34 (2005); Padlan, Mol. Immunol. 28:489-498 (1991); Dall'Acqua et al., Methods 36:43-60 (2005); Osbourn et al., Methods 36:61-68 (2005); and Klimka et al., Br. J. Cancer, 83:252-260 (2000).

[0738] A non-human antibody can be humanized to reduce immunogenicity to humans, while retaining the specificity and affinity of the parental non-human antibody. A humanized antibody can comprise one or more variable domains comprising one or more CDRs, or portions thereof, derived from a non-human antibody. A humanized antibody can comprise one or more variable domains comprising one or more FRs, or portions thereof, derived from human antibody sequences. A humanized antibody can optionally comprise at least a portion of a human constant region. In some embodiments, one or more FR residues in a humanized antibody are substituted with corresponding residues from a non-human antibody (e.g., the antibody from which the CDR residues are derived), e.g., to restore or improve antibody specificity or affinity. Human framework regions that may be used for humanization include but are not limited to: framework regions selected using a “best-fit” method; framework regions derived from the consensus sequence of human antibodies of a particular subgroup of light or heavy chain variable regions; human mature (somatically mutated) framework regions or human germline framework regions; and framework regions derived from screening FR libraries (See, e.g., Sims et al., J. Immunol. 151:2296 (1993); Carter et al. Proc. Natl. Acad. Sci. USA, 89:4285 (1992); Presta et al., J. Immunol., 151:2623 (1993); Baca et al., J. Biol. Chem. 272:10678-10684 (1997); and Rosok et al., J. Biol. Chem. 271:22611-22618 (1996)).

### Human Antibodies

[0739] In some embodiments, an antibody provided herein is a human antibody. Human antibodies can be produced using various techniques known in the art (See, e.g., van Dijk and van de Winkel, Curr. Opin. Pharmacol. 5: 368-74 (2001); and Lonberg, Curr. Opin. Immunol. 20:450-459 (2008)). A human antibody is one which possesses an amino acid sequence which corresponds to that of an antibody produced by a human or a human cell or derived from a non-human source that utilizes human antibody repertoires or other human antibody-encoding sequences. This definition of a human antibody specifically excludes a humanized antibody comprising non-human antigen-binding residues. Human antibodies may be prepared by administering an immunogen (e.g., a cancer cell antigen) to a transgenic animal that has been modified to produce intact human antibodies or intact antibodies with human variable regions in response to antigenic challenge. (See, e.g., Lonberg, Nat. Biotech. 23:1117-1125 (2005)). Human variable regions from intact antibodies generated by such animals may be further modified, e.g., by combining with a different human constant region. Human antibodies can also be made by hybridoma-based methods. For example, human antibodies can be produced from human myeloma and mouse-human heteromyeloma cell lines, using human B-cell hybridoma technology, and other methods (See, e.g., Kozbor J. Immunol., 133: 3001 (1984); Brodeur et al., Monoclonal Antibody Production Techniques and Applications, pp. 51-63 (1987); Boerner et al., J. Immunol., 147: 86 (1991); Li et al., Proc. Natl. Acad. USA, 103:3557-3562 (2006); Ni, Xiandai Mianyixue, 26(4):265-268 (2006); Vollmers and Brandlein, Histology and Histopathology, 20(3):927-937 (2005); and Vollmers and Brandlein, Methods and Findings in Experimental and Clinical Pharmacology, 27(3):185-91 (2005)). Human antibodies may also be generated by isolating Fv clone variable domain sequences selected from human-derived phage display libraries. Such variable domain sequences may then be combined with a desired human constant domain.

### Deimmunized Antibodies

[0740] An antibody or an antigen-binding fragment thereof described herein can be optionally assessed for immunogenicity and, as needed, be deimmunized (i.e., the antibody is made less immunoreactive by altering one or more T cell epitopes). As used herein, a “deimmunized antibody” means that one or more T cell epitopes in an antibody sequence have been modified such that a T cell response after administration of the antibody to a subject is reduced compared to an antibody that has not been deimmunized, yet the antibody retains its binding activity. Analysis of immunogenicity and T-cell epitopes present in the antibodies and antigen-binding fragments described herein can be carried out via the use of software and specific databases known in the art. Exemplary software and databases include iTope™ developed by Antitope of Cambridge, England. iTope™, is an in silico technology for analysis of peptide binding to human MHC class II alleles. The iTope™ software predicts peptide binding to human MHC class II alleles and thereby provides an initial screen for the location of such “potential T cell epitopes.” iTope™ software predicts favorable interactions between amino acid side chains of a peptide and specific binding pockets within the binding grooves of 34 human MHC class II alleles. The location of key binding residues is achieved by the in silico generation of 9mer peptides that overlap by one amino acid spanning the test antibody variable region sequence. Each 9mer peptide can be tested against each of the 34 MHC class II allotypes and scored based on their potential “fit” and interactions with the MHC class II binding groove. Peptides that produce a high mean binding score (>0.55 in the iTope™ scoring function) against >50% of the MHC class II alleles are considered as potential T cell epitopes. In such regions, the core 9 amino acid sequence for peptide binding within the MHC class II groove is analyzed to determine the MHC class II pocket residues (P1, P4, P6, P7 and P9) and the possible T cell receptor (TCR) contact residues (P-1, P2, P3, P5, P8). After identification of any T-cell epitopes, amino acid residue changes, substitutions, additions, and/or deletions can be introduced to remove the identified T-cell epitope. Such changes can be made so as to preserve antibody structure and function while still removing the identified epitope. Exemplary changes can include, but are not limited to, conservative amino acid changes.

### Engineered and Modified Antibodies

[0741] An antibody according to at least some embodiments of the invention further can be prepared using an antibody having one or more of the VH and/or VL sequences derived from an antibody or antigen-binding fragment thereof, disclosed herein, starting material to engineer a modified antibody, which modified antibody may have altered properties from the starting antibody. Provided herein are complete reconstructed amino acid and nucleic acid consensus sequences of VH and VL chain regions of antibodies disclosed herein. Also provided herein, are the amino acid and nucleic acid sequences of the CDR3 regions of the VH and VL of the antibodies, described herein. An antibody can be engineered by modifying one or more residues within one or both variable regions (i.e., VH and/or VL), for example within one or more CDR regions and/or within one or more framework regions. Additionally or alternatively, an antibody can be engineered by modifying residues within the constant regions, for example to alter the effector functions of the antibody.

[0742] One type of variable region engineering that can be performed is CDR grafting. Antibodies interact with target antigens predominantly through amino acid residues that are located in the six heavy and light chain complementarity determining regions (CDRs). For this reason, the amino acid sequences within CDRs are more diverse between individual antibodies than sequences outside of CDRs. Because CDR sequences are responsible for most antibody-antigen interactions, it is possible to express recombinant antibodies that mimic the properties of specific antibodies by constructing expression vectors that include CDR sequences from the specific antibody (e.g., antibodies disclosed herein) grafted onto framework sequences from a different antibody with different properties (see, e.g., Riechmann, L. et al. (1998) Nature 332:323-327; Jones, P. et al. (1986) Nature 321:522-525; Queen, C. et al. (1989) Proc. Natl. Acad. See. U.S.A. 86:10029-10033; U.S. Pat. No. 5,225,539 to Winter, and U.S. Pat. Nos. 5,530,101; 5,585,089; 5,693,762 and 6,180,370 to Queen et al.)

[0743] Suitable framework sequences can be obtained from public DNA databases or published references that include germline antibody gene sequences. For example, germline DNA sequences for human heavy and light chain variable region genes can be found in the “VBase” human germline sequence database (available on the Internet), as well as in Kabat, E. A., et al. (1991) Sequences of Proteins of Immunological Interest, Fifth Edition, U.S. Department of Health and Human Services, NIH Publication No. 91-3242; Tomlinson, I. M., et al. (1992) “The Repertoire of Human Germline VH Sequences Reveals about Fifty Groups of VH Segments with Different Hypervariable Loops” J. Mol. Biol. 227:776-798; and Cox, J. P. L. et al. (1994) “A Directory of Human Germ-line VH Segments Reveals a Strong Bias in their Usage” Eur. J. Immunol. 24:827-836; the contents of each of which are expressly incorporated herein by reference. Another type of variable region modification is to mutate amino acid residues within the VH and/or VL CDR 1, CDR2 and/or CDR3 regions to thereby improve one or more binding properties (e.g., affinity) of the antibody of interest. Site-directed mutagenesis or PCR-mediated mutagenesis can be performed to introduce the mutations and the effect on antibody binding, or other functional property of interest, can be evaluated in appropriate in vitro or in vivo assays. Preferably conservative modifications (as discussed above) are introduced. The mutations may be amino acid substitutions, additions or deletions, but are preferably substitutions. Moreover, typically no more than one, two, three, four or five residues within a CDR region are altered.

[0744] Engineered antibodies according to at least some embodiments of the invention include those in which modifications have been made to framework residues within VH and/or VL, e.g. to improve the properties of the antibody. Typically such framework modifications are made to decrease the immunogenicity of the antibody. For example, one approach is to “backmutate” one or more framework residues to the corresponding germline sequence. More specifically, an antibody that has undergone somatic mutation may contain framework residues that differ from the germline sequence from which the antibody is derived. Such residues can be identified by comparing the antibody framework sequences to the germline sequences from which the antibody is derived.

[0745] In addition or alternative to modifications made within the framework or CDR regions, antibodies according to at least some embodiments of the disclosure may be engineered to include modifications within the Fe region, typically to alter one or more functional properties of the antibody, such as serum half-life, complement fixation, Fc receptor binding, and/or antigen-dependent cellular cytotoxicity. Furthermore, an antibody according to at least some embodiments of the invention may be chemically modified (e.g., one or more chemical moieties can be attached to the antibody) or be modified to alter its glycosylation, again to alter one or more functional properties of the antibody. Such embodiments are described above. The numbering of residues in the Fc region is that of the EU index of Kabat.

[0746] In one embodiment, the hinge region of CH1 is modified such that the number of cysteine residues in the hinge region is altered, e.g., increased or decreased. This approach is described further in U.S. Pat. No. 5,677,425 by Bodmer et al. The number of cysteine residues in the hinge region of CH1 is altered to, for example, facilitate assembly of the light and heavy chains or to increase or decrease the stability of the antibody. In another embodiment, the Fc hinge region of an antibody is mutated to decrease the biological half-life of the antibody. More specifically, one or more amino acid mutations are introduced into the CH2-CH3 domain interface region of the Fc-hinge fragment such that the antibody has impaired Staphylococcyl protein A (SpA) binding relative to native Fc-hinge domain SpA binding. This approach is described in further detail in U.S. Pat. No. 6,165,745 by Ward et al.

[0747] In another embodiment, the antibody is modified to increase its biological half-life. Various approaches are possible. For example, to increase the biological half-life, the antibody can be altered within the CH1 or CL region to contain a salvage receptor binding epitope taken from two loops of a CH2 domain of an Fc region of an IgG, as described in U.S. Pat. Nos. 5,869,046 and 6,121,022 by Presta et al.

### Recombinant Human Antibodies

[0748] The term “recombinant human antibody”, as used herein, includes all human antibodies that are prepared, expressed, created or isolated by recombinant means, such as (a) antibodies isolated from an animal (e.g., a mouse) that is transgenic or transchromosomal for human immunoglobulin genes or a hybridoma prepared therefrom (described further below), (b) antibodies isolated from a host cell transformed to express the human antibody, e.g., from a transfectoma, (c) antibodies isolated from a recombinant, combinatorial human antibody library, and (d) antibodies prepared, expressed, created or isolated by any other means that involve splicing of human immunoglobulin gene sequences to other DNA sequences. Such recombinant human antibodies have variable regions in which the framework and CDR regions are derived from reconstructed immunoglobulin consensus sequences, disclosed herein. In certain embodiments, however, such recombinant human antibodies can be subjected to in vitro mutagenesis (or, when an animal transgenic for human Ig sequences is used, in vivo somatic mutagenesis) and thus the amino acid sequences of the VH and VL regions of the recombinant antibodies are sequences that, while derived from and related to human immunoglobulin VH and VL sequences, may not naturally exist within the human antibody germline repertoire in vivo.

### Antigen-Binding Fragments

[0749] The terms “antibody fragment,” “antigen-binding fragment,” or “antibody binding domain” refer to at least one portion of an antibody, or recombinant variants thereof, that contains the antigen-binding domain, i.e., an antigenic determining variable region of an intact antibody, that is sufficient to confer recognition and specific binding of the antibody fragment to a target, such as an antigen and its defined epitope. Examples of antigen-binding fragments include, but are not limited to, Fab, Fab′, F(ab′)2, and Fv fragments, single-chain (sc)Fv (“scFv”) antibody fragments, linear antibodies, single domain antibodies such as sdAb (either VL or VH), camelid VHH domains, and multi-specific antibodies formed from antibody fragments. Antibody fragments can be made by various techniques, including but not limited to proteolytic digestion of an intact antibody as well as production by recombinant host cells (e.g., E. coli or phage), as described herein.

[0750] An Fv is the minimum antibody fragment that contains a complete antigen-recognition and antigen-binding site. This fragment contains a dimer of one heavy- and one light-chain variable region domain in tight, non-covalent association. From the folding of these two domains emanate six hypervariable loops (three loops each from the H and L chain) that contribute the amino acid residues for antigen-binding and confer antigen-binding specificity to the antibody. However, even a single variable region (or half of an Fv comprising only three CDRs specific for an antigen) has the ability to recognize and bind antigen, although at a lower affinity than the entire binding site.

[0751] The term “scFv” refers to a fusion protein comprising at least one antibody fragment comprising a variable region of a light chain and at least one antibody fragment comprising a variable region of a heavy chain, wherein the light and heavy chain variable regions are contiguously linked via a short flexible polypeptide linker, and capable of being expressed as a single polypeptide chain, and wherein the scFv retains the specificity of the intact antibody from which it is derived. Unless specified, as used herein a scFv may have the VL and VH variable regions in either order, e.g., with respect to the N-terminal and C-terminal ends of the polypeptide, the scFv may comprise VL-linker-VH or may comprise VH-linker-VL.

[0752] A diabody is a small antibody fragment prepared by constructing a sFv fragment with a short linker (about 5-10 residues) between the VH and VL domains such that inter-chain but not intra-chain pairing of the V domains is achieved, resulting in a bivalent fragment. Bispecific diabodies are heterodimers of two crossover sFv fragments in which the VH and VL domains of the two antibodies are present on different polypeptide chains. (See, e.g., Hollinger et al., Proc. Natl. Acad. Sci. USA, 90:6444-6448 (1993)).

[0753] Domain antibodies (dAbs), which can be produced in fully human form, are the smallest known antigen-binding fragments of antibodies, ranging from about 11 kDa to about 15 kDa. DAbs are the robust variable regions of the heavy and light chains of immunoglobulins (VH and VL, respectively). They are highly expressed in microbial cell culture, show favorable biophysical properties including, for example, but not limited to, solubility and temperature stability, and are well suited to selection and affinity maturation by in vitro selection systems such as, for example, phage display. DAbs are bioactive as monomers and, owing to their small size and inherent stability can be formatted into larger molecules to create drugs with prolonged serum half-lives or other pharmacological activities.

[0754] Fv and sFv are the only species with intact combining sites that are devoid of constant regions. Thus, they are suitable for reduced nonspecific binding during in vivo use. sFv fusion proteins can be constructed to yield fusion of an effector protein at either the amino or the carboxy terminus of an sFv. The antibody fragment also can be a “linear antibody. Such linear antibody fragments can be monospecific or bispecific.

### Multispecific Antibodies and Antigen-Binding Fragments

[0755] In some embodiments, an antibody provided herein is a multispecific antibody, e.g., a bispecific antibody. Multispecific antibodies are monoclonal antibodies that have binding specificities for at least two different sites. In some embodiments, one of the binding specificities is for cancer associated antigen and the other is for any other antigen. In some embodiments, bispecific antibodies may bind to two different epitopes of antigen. Bispecific antibodies may also be used to localize cytotoxic agents to cancer cells. Bispecific antibodies can be prepared as full length antibodies or antibody fragments.

[0756] In some embodiments, it may be desirable to generate multispecific (e.g. bispecific) monoclonal antibody including monoclonal, human, humanized, or variant antibodies having binding specificities for at least two different epitopes. In some embodiments, the antibodies disclosed herein are multispecific. Exemplary bispecific antibodies may bind to two different epitopes of an antigen (e.g., cancer associated antigen). Alternatively, an antigen-binding region may be combined with a region which binds to a triggering molecule on a leukocyte such as a T-cell receptor molecule (e.g., CD2 or CD3), or Fe receptors for IgG (FcγR), such as FcγRI (CD64), FcγRII (CD32) and FcγRIII (CD16) so as to focus cellular defense mechanisms to the antigen-expressing cell. Bispecific antibodies may also be used to localize cytotoxic agents to cells which express desired antigen. These antibodies possess an antigen-binding arm and an arm which binds the cytotoxic agent (e.g., saporin, anti-interferon-60, vinca alkaloid, ricin A chain, methotrexate or radioactive isotope hapten). Bispecific antibodies can be prepared as full length antibodies or antibody fragments (e.g., F(ab′)2 bispecific antibodies).

[0757] According to another approach for making bispecific antibodies, the interface between a pair of antibody molecules can be engineered to maximize the percentage of heterodimers which are recovered from recombinant cell culture. The preferred interface comprises at least a part of the CH3 domain of an antibody constant domain. In this method, one or more small amino acid side chains from the interface of the first antibody molecule are replaced with larger side chains (e.g., tyrosine or tryptophan). Compensatory “cavities” of identical or similar size to the large side chain(s) are created on the interface of the second antibody molecule by replacing large amino acid side chains with smaller ones (e.g., alanine or threonine). This provides a mechanism for increasing the yield of the heterodimer over other unwanted end-products such as homodimers.

[0758] Bispecific antibodies include cross-linked or “heteroconjugate” antibodies. For example, one of the antibodies in the heteroconjugate can be coupled to avidin, the other to biotin. Heteroconjugate antibodies may be made using any convenient cross-linking methods. Suitable cross-linking agents are contemplated, along with a number of cross-linking techniques.

[0759] Techniques for generating bispecific antibodies from antibody fragments have also been described in the literature. For example, bispecific antibodies can be prepared using chemical linkage. Brennan et al., Science 229: 81 (1985) describe a procedure wherein intact antibodies are proteolytically cleaved to generate F(ab′)2 fragments. These fragments are reduced in the presence of the dithiol complexing agent sodium arsenite to stabilize vicinal dithiols and prevent intermolecular disulfide formation. The Fab′ fragments generated are then converted to thionitrobenzoate (TNB) derivatives. One of the Fab′-TNB derivatives is then reconverted to the Fab′-thiol by reduction with mercaptoethylamine and is mixed with an equimolar amount of the other Fab′-TNB derivative to form the bispecific antibody. The bispecific antibodies produced can be used as agents for the selective immobilization of enzymes. In yet a further embodiment, Fab′-SH fragments directly recovered from E. coli can be chemically coupled in vitro to form bispecific antibodies. (Shalaby et al., J. Exp. Med. 175:217-225 (1992))

[0760] Exemplary techniques for making multispecific antibodies include recombinant co-expression of two immunoglobulin heavy chain-light chain pairs having different specificities, engineering electrostatic steering effects for making antibody Fc-heterodimeric molecules, cross-linking two or more antibodies or fragments, using leucine zippers to produce bi-specific antibodies, using “diabody” technology for making bispecific antibody fragments, using single-chain Fv (sFv) dimers, preparing trispecific antibodies, and “knob-in-hole” engineering (See, e.g., Milstein and Cuello, Nature 305: 537 (1983); Traunecker et al., EMBO J., 10: 3655 (1991); U.S. Pat. Nos. 4,676,980 and 5,731,168; Brennan et al., Science, 229: 81 (1985); Kostelny et al., J. Immunol., 148(5):1547-1553 (1992); Hollinger et al., Proc. Natl. Acad. Sci. USA, 90:6444-6448 (1993); Gruber et al., J. Immunol., 152:5368 (1994)); and Tutt et al. J. Immunol. 147: 60 (1991)). Engineered antibodies with three or more functional antigen-binding sites are also contemplated.

### Variants and Modifications

[0761] In another aspect, provided herein are variants of antibodies or antigen-binding fragments thereof.

### Substitution, Insertion, and Deletion Variants

[0762] In some embodiments, amino acid sequence variants of the antibodies provided herein are contemplated. A variant typically differs from a polypeptide specifically disclosed herein in one or more substitutions, deletions, additions and/or insertions. Such variants can be naturally-occurring or can be synthetically generated, for example, by modifying one or more of the above polypeptide sequences of the invention and evaluating one or more biological activities of the polypeptide as described herein and/or using any of a number of techniques well known in the art. For example, it may be desirable to improve the binding affinity and/or other biological properties of the antibody amino acid sequence variants of an antibody may be prepared by introducing appropriate modifications into the nucleotide sequence encoding the antibody, or by peptide synthesis. Such modifications include, for example, deletions from, and/or insertions into and/or substitutions of residues within the amino acid sequences of the antibody. Any combination of deletion, insertion, and substitution can be made to arrive at the final construct, provided that the final construct possesses the desired characteristics, e.g., antigen-binding.

[0763] In some embodiments, antibody variants or antigen-binding fragment thereof having one or more amino acid substitutions are provided. Sites of interest for mutagenesis by substitution include the CDRs and FRs. Amino acid substitutions may be introduced into an antibody of interest and the products screened for a desired activity, e.g., retained/improved antigen binding, decreased immunogenicity, or improved ADCC or CDC function.

| Original Residue | Exemplary Conserved Substitutions |
|---|---|
| Ala (A) | Val; Leu; Ile |
| Arg (R) | Lys; Gln; Asn |
| Asn (N) | Gln; His; Asp, Lys; Arg |
| Asp (D) | Glu; Asn |
| Cys (C) | Ser; Ala |
| Gln (Q) | Asn; Glu |
| Glu (E) | Asp; Gln |
| Gly (G) | Ala |
| His (H) | Asn; Gln; Lys; Arg |
| Ile (I) | Leu; Val; Met; Ala; Phe; Norleucine |
| Leu (L) | Norleucine; Ile; Val; Met; Ala; Phe |
| Lys (K) | Arg; Gln; Asn |
| Met (M) | Leu; Phe; Ile |
| Phe (F) | Trp; Leu; Val; Ile; Ala; Tyr |
| Pro (P) | Ala |
| Ser (S) | Thr |
| Thr (T) | Val; Ser |
| Trp (W) | Tyr; Phe |
| Tyr (Y) | Trp; Phe; Thr; Ser |
| Val (V) | Ile; Leu; Met; Phe; Ala; Norleucine |

[0764] Hydrophobic amino acids include: Norleucine, Met, Ala, Val, Leu, and Ile. Neutral hydrophilic amino acids include: Cys, Ser, Thr, Asn, and Gln. Acidic amino acids include: Asp and Glu. Basic amino acids include: His, Lys, and Arg. Amino acids with residues that influence chain orientation include: Gly and Pro. Aromatic amino acids include: Trp, Tyr, and Phe.

[0765] In some embodiments, substitutions, insertions, or deletions may occur within one or more CDRs, wherein the substitutions, insertions, or deletions do not substantially reduce antibody binding to antigen. For example, conservative substitutions that do not substantially reduce binding affinity may be made in CDRs. Such alterations may be outside of CDR “hotspots” or SDRs. In some embodiments of the variant VH and VL sequences, each CDR either is unaltered, or contains no more than one, two or three amino acid substitutions.

[0766] Alterations (e.g., substitutions) may be made in CDRs, e.g., to improve antibody affinity. Such alterations may be made in CDR encoding codons with a high mutation rate during somatic maturation (See, e.g., Chowdhury, Methods Mol. Biol. 207:179-196 (2008)), and the resulting variant can be tested for binding affinity. Affinity maturation (e.g., using error-prone PCR, chain shuffling, randomization of CDRs, or oligonucleotide-directed mutagenesis) can be used to improve antibody affinity (See, e.g., Hoogenboom et al. in Methods in Molecular Biology 178:1-37 (2001)). CDR residues involved in antigen-binding may be specifically identified, e.g., using alanine scanning mutagenesis or modeling (See, e.g., Cunningham and Wells, Science, 244:1081-1085 (1989)). CDR-H3 and CDR-L3 in particular are often targeted. Alternatively, or additionally, a crystal structure of an antigen-antibody complex to identify contact points between the antibody and antigen. Such contact residues and neighboring residues may be targeted or eliminated as candidates for substitution. Variants may be screened to determine whether they contain the desired properties.

[0767] Amino acid sequence insertions and deletions include amino- and/or carboxyl-terminal fusions ranging in length from one residue to polypeptides containing a hundred or more residues, as well as intrasequence insertions and deletions of single or multiple amino acid residues. Examples of terminal insertions include an antibody with an N-terminal methionyl residue. Other insertional variants of the antibody molecule include the fusion to a polypeptide which increases serum half-life of the antibody, for example, at the N-terminus or C-terminus. The term “epitope tagged” refers to the antibody fused to an epitope tag. The epitope tag polypeptide has enough residues to provide an epitope against which an antibody there against can be made, yet is short enough such that it does not interfere with activity of the antibody. The epitope tag preferably is sufficiently unique so that the antibody there against does not substantially cross-react with other epitopes. Suitable tag polypeptides generally have at least 6 amino acid residues and usually between about 8-50 amino acid residues (preferably between about 9-30 residues). Examples include the flu HA tag polypeptide and its antibody 12CA5 [Field et al., Mal. Cell. Biol. 8: 2159-2165 (1988)]; the c-myc tag and the 8F9, 3C7, 6E10, G4, B7 and 9E10 antibodies thereto [Evan et al., Mal. Cell. Biol. 5(12): 3610-3616 (1985)]; and the Herpes Simplex virus glycoprotein D (gD) tag and its antibody [Paborsky et al., Protein Engineering 3(6): 547-553 (1990)]. Other exemplary tags are a poly-histidine sequence, generally around six histidine residues, that permits isolation of a compound so labeled using nickel chelation. Other labels and tags, such as the FLAG® tag (Eastman Kodak, Rochester, N.Y.), well known and routinely used in the art, are embraced by the invention.

[0768] Other insertional variants of the antibody molecule include the fusion to the N- or C-terminus of the antibody to an enzyme (e.g., for ADEPT) or a polypeptide which increases the serum half-life of the antibody. Examples of intrasequence insertion variants of the antibody molecules include an insertion of 3 amino acids in the light chain. Examples of terminal deletions include an antibody with a deletion of 7 or less amino acids at an end of the light chain.

### Glycosylation Variants

[0769] In some embodiments, the antibodies are altered to increase or decrease their glycosylation (e.g., by altering the amino acid sequence such that one or more glycosylation sites are created or removed). A carbohydrate attached to an Fc region of an antibody may be altered. Native antibodies from mammalian cells typically comprise a branched, biantennary oligosaccharide attached by an N-linkage to Asn297 of the CH2 domain of the Fc region (See, e.g., Wright et al. TIBTECH 15:26-32 (1997)). The oligosaccharide can be various carbohydrates, e.g., mannose, N-acetyl glucosamine (GlcNAc), galactose, sialic acid, fucose attached to a GlcNAc in the stem of the biantennary oligosaccharide structure. Modifications of the oligosaccharide in an antibody can be made, for example, to create antibody variants with certain improved properties. Antibody glycosylation variants can have improved ADCC and/or CDC function.

[0770] In some embodiments, antibody variants are provided having a carbohydrate structure that lacks fucose attached (directly or indirectly) to an Fc region. For example, the amount of fucose in such antibody may be from 1% to 80%, from 1% to 65%, from 5% to 65% or from 20% to 40%. The amount of fucose is determined by calculating the average amount of fucose within the sugar chain at Asn297, relative to the sum of all glycostructures attached to Asn297 (See, e.g., WO 08/077546). Asn297 refers to the asparagine residue located at about position 297 in the Fc region (Eu numbering of Fc region residues); however, Asn297 may also be located about ±3 amino acids upstream or downstream of position 297, i.e., between positions 294 and 300, due to minor sequence variations in antibodies. Such fucosylation variants can have improved ADCC function (See, e.g. Okazaki et al. J. Mol. Biol. 336:1239-1249 (2004); and Yamane-Ohnuki et al. Biotech. Bioeng. 87: 614 (2004)). Cell lines, e.g., knockout cell lines and methods of their use can be used to produce defucosylated antibodies, e.g., Lec13 CHO cells deficient in protein fucosylation and alpha-1,6-fucosyltransferase gene (FUT8) knockout CHO cells (See, e.g., Ripka et al. Arch. Biochem. Biophys. 249:533-545 (1986); Yamane-Ohnuki et al. Biotech. Bioeng. 87: 614 (2004); Kanda, Y. et al., Biotechnol. Bioeng., 94(4):680-688 (2006). Other antibody glycosylation variants are also contemplated.

[0771] In still another embodiment, the glycosylation of an antibody is modified. For example, an aglycosylated antibody can be made (i.e., the antibody lacks glycosylation). Glycosylation can be altered to, for example, increase the affinity of the antibody for antigen. Such carbohydrate modifications can be accomplished by, for example, altering one or more sites of glycosylation within the antibody sequence. For example, one or more amino acid substitutions can be made that result in elimination of one or more variable region framework glycosylation sites to thereby eliminate glycosylation at that site. Such aglycosylation may increase the affinity of the antibody for antigen. Such an approach is described in further detail in U.S. Pat. Nos. 5,714,350 and 6,350,861 by Co et al. Conservative substitutions involve replacing an amino acid with another member of its class. Non-conservative substitutions involve replacing a member of one of these classes with a member of another class.

[0772] Accordingly, the antibodies or antigen-binding fragment thereof of the present disclosure can be produced by a host cell with one or more of exogenous and/or high endogenous glycosyltransferase activities. Genes with glycosyltransferase activity include β(1,4)-N-acetylglucosaminyltransferase III (GnTII), α-mannosidase II (ManII), β(1,4)-galactosyltransferase (GalT), β(1,2)-N-acetylglucosaminyltransferase I (GnTI), and β(1,2)-N-acetylglucosaminyltransferase II (GnTII). The glycotranferases can comprise a fusion comprising a Golgi localization domain (See, e.g., Lifely et al., Glycobiology 318:813-22 (1995); Schachter, Biochem. Cell Biol. 64:163-81 (1986)). In some embodiments, an antibody can be expressed in a host cell comprising a disrupted or deactivated glycosyltransferase gene. Accordingly, in some embodiments, the present disclosure is directed to a host cell comprising (a) an isolated nucleic acid comprising a sequence encoding a polypeptide having a glycosyltransferase activity; and (b) an isolated polynucleotide encoding an antibody or antigen-binding fragment thereof of the present disclosure. In a particular embodiment, the modified antibody produced by the host cell has an IgG constant region or a fragment thereof comprising the Fc region. In another particular embodiment the antibody is a humanized antibody or a fragment thereof comprising an Fc region. An isolated nucleic acid is a nucleic acid molecule that has been separated from a component of its natural environment. An isolated nucleic acid includes a nucleic acid molecule contained in cells that ordinarily contain the nucleic acid molecule, but the nucleic acid molecule is present extrachromosomally or at a chromosomal location that is different from its natural chromosomal location.

[0773] Antibodies with altered glycosylation produced by the host cells of the invention can exhibit increased Fc receptor binding affinity (e.g., increased binding to a Fcγ activating receptor, such as the FcγRIIIa receptor) and/or increased effector function. The increased effector function can be an increase in one or more of the following: increased antibody-dependent cellular cytotoxicity, increased antibody-dependent cellular phagocytosis (ADCP), increased cytokine secretion, increased immune-complex-mediated antigen uptake by antigen-presenting cells, increased Fc-mediated cellular cytotoxicity, increased binding to NK cells, increased binding to macrophages, increased binding to polymorphonuclear cells (PMNs), increased binding to monocytes, increased crosslinking of target-bound antibodies, increased direct signaling inducing apoptosis, increased dendritic cell maturation, and increased T cell priming. Accordingly, in one aspect, the present invention provides glycoforms of an antibody having increased effector function as compared to the antibody that has not been glycoengineered. (See, e.g., Tang et al., J. Immunol. 179: 2815-2823 (2007)).

[0774] The present disclosure is also directed to a method for producing an antibody or antigen-binding fragment thereof, described herein having modified oligosaccharides, comprising (a) culturing a host cell engineered to express at least one nucleic acid encoding a polypeptide having glycosyltransferase activity under conditions which permit the production of an antibody according to the present disclosure, wherein said polypeptide having glycosyltransferase activity is expressed in an amount sufficient to modify the oligosaccharides in the Fc region of said antibody produced by said host cell; and (b) isolating said antibody. In another embodiment, there are two polypeptides having glycosyltransferase activity. The antibodies or antigen-binding fragment thereof produced by the methods of the present invention can have increased Fc receptor binding affinity and/or increased effector function. In some embodiments, the percentage of bisected N-linked oligosaccharides in the Fc region of the antibody is at least about 10% to about 100%, specifically at least about 50%, more specifically, at least about 60%, at least about 70%, at least about 80%, or at least about 90-95% of the total oligosaccharides. In yet another embodiment, the antibody produced by the methods of the invention has an increased proportion of nonfucosylated oligosaccharides in the Fc region as a result of the modification of its oligosaccharides by the methods of the present invention. In some embodiments, the percentage of nonfucosylated oligosaccharides is at least about 20% to about 100%, specifically at least about 50%, at least about 60% to about 70%, and more specifically, at least about 75%. The nonfucosylated oligosaccharides may be of the hybrid or complex type. In yet another embodiment, the antibody or antigen-binding fragment thereof produced by the methods of the invention has an increased proportion of bisected oligosaccharides in the Fc region as a result of the modification of its oligosaccharides by the methods of the present invention. In some embodiments, the percentage of bisected oligosaccharides is at least about 20% to about 100%, specifically at least about 50%, at least about 60% to about 70%, and more specifically, at least about 75%.

[0775] In another embodiment, the present invention is directed to an antibody or antigen-binding fragment thereof engineered to have increased effector function and/or increased Fc receptor binding affinity, produced by the methods of the disclosure. In some embodiments, the antibody is an intact antibody. In some embodiments, the antibody is an antibody fragment containing the Fc region, or a fusion protein that includes a region equivalent to the Fc region of an immunoglobulin.

[0776] In one aspect, the present disclosure provides host cell expression systems for the generation of the antibodies or antigen-binding fragment thereof of the present disclosure having modified glycosylation patterns. In particular, the present disclosure provides host cell systems for the generation of glycoforms of the antibodies or antigen-binding fragment thereof, disclosed herein, having an improved therapeutic value. Therefore, the present disclosure provides host cell expression systems selected or engineered to express a polypeptide having a glycosyltransferase activity. Generally, any type of cultured cell line, including the cell lines discussed above, can be used as a background to engineer the host cell lines of the present invention. In some embodiments, CHO cells, BHK cells, NS0 cells, SP2/0 cells, YO myeloma cells, P3X63 mouse myeloma cells, PER cells, PER.C6 cells or hybridoma cells, other mammalian cells, yeast cells, insect cells, or plant cells are used as the background cell line to generate the engineered host cells of the invention. The host cells which contain the coding sequence of an antibody or antigen-binding fragment thereof of the invention and which express the biologically active gene products may be identified by at least four general approaches; (a) DNA-DNA or DNA-RNA hybridization; (b) the presence or absence of “marker” gene functions; (c) assessing the level of transcription as measured by the expression of the respective mRNA transcripts in the host cell; and (d) detection of the gene product as measured by immunoassay or by its biological activity.

### Cysteine Engineered Antibody Variants

[0777] In some embodiments, it may be desirable to create cysteine engineered antibodies or antigen-binding fragment thereof, e.g., “thioMAbs,” in which one or more residues of an antibody are substituted with cysteine residues. In some embodiments, the substituted residues occur at accessible sites of the antibody. Reactive thiol groups can be positioned at sites for conjugation to other moieties, such as drug moieties or linker-drug moieties, to create an immunoconjugate. In some embodiments, any one or more of the following residues may be substituted with cysteine: V205 (Kabat numbering) of the light chain; A118 (EU numbering) of the heavy chain; and S400 (EU numbering) of the heavy chain Fc region. Cysteine engineered antibodies may be generated as described. Any cysteine residue not involved in maintaining the proper conformation of the monoclonal, human, humanized, or variant antibody also may be substituted, generally with serine, to improve the oxidative stability of the molecule and prevent aberrant crosslinking. Conversely, cysteine bond(s) may be added to the antibody to improve its stability (particularly where the antibody is an antibody fragment such as an Fv fragment).

### Antibody Derivatives

[0778] In some embodiments, an antibody or antigen-binding fragment thereof provided herein may be further modified to contain additional nonproteinaceous moieties that are known in the art and readily available. The moieties suitable for derivatization of the antibody include but are not limited to water soluble polymers. Non-limiting examples of water soluble polymers include, but are not limited to, polyethylene glycol (PEG), copolymers of ethylene glycol/propylene glycol, carboxymethylcellulose, dextran, polyvinyl alcohol, polyvinyl pyrrolidone, poly-1,3-dioxolane, poly-1,3,6-trioxane, ethylene/maleic anhydride copolymer, polyaminoacids (either homopolymers or random copolymers), and dextran or poly(n-vinyl pyrrolidone)polyethylene glycol, polypropylene glycol homopolymers, polypropylene oxide/ethylene oxide co-polymers, polyoxyethylated polyols (e.g., glycerol), polyvinyl alcohol, and mixtures thereof. Polyethylene glycol propionaldehyde may have advantages in manufacturing due to its stability in water. The polymer may be of any molecular weight, and may be branched or unbranched. The number of polymers attached to the antibody may vary, and if two or more polymers are attached, they can be the same or different molecules.

[0779] In another embodiment, conjugates of an antibody and nonproteinaceous moiety that may be selectively heated by exposure to radiation are provided. In some embodiments, the nonproteinaceous moiety is a carbon nanotube (See, e.g., Kam et al., Proc. Natl. Acad. Sci. USA 102: 11600-11605 (2005)). The radiation may be of any wavelength, and includes, but is not limited to, wavelengths that do not harm ordinary cells, but which heat the nonproteinaceous moiety to a temperature at which cells proximal to the antibody-nonproteinaceous moiety are killed.

### Fc Region Variants

[0780] Mutation of residues within Fc receptor binding sites can result in altered effector function, such as altered ADCC, CDC activity, and/or altered half-life. Mutations include, for example, insertion, deletion, and/or substitution of one or more residues as described in more detail above, including substitution with alanine, a conservative substitution, a non-conservative substitution, and/or replacement with a corresponding amino acid residue at the same position from a different IgG subclass (e.g., replacing an IgG1 residue with a corresponding IgG2 residue at that position). An Fc region herein is a C-terminal region of an immunoglobulin heavy chain that contains at least a portion of the constant region. An Fc region includes native sequence Fc regions and variant Fc regions. The Fc region variant may comprise a human Fc region sequence (e.g., a human IgG1, IgG2, IgG3 or IgG4 Fc region) comprising an amino acid modification (e.g., a substitution) at one or more amino acid positions.

[0781] Previous studies mapped the binding site on human and murine IgG for FcγR primarily to the lower hinge region composed of IgG residues 233-239. Other studies proposed additional broad segments, e.g., Gly316-Lys338 for human Fc gamma receptor I, Lys274-Arg301 and Tyr407Arg416 for human Fc gamma receptor III, or found a few specific residues outside the lower hinge, e.g., Asn297 and Glu318 for murine IgG2b interacting with murine Fc gamma receptor II. The report of the 3.2-A crystal structure of the human IgG Fc fragment with human Fc gamma receptor IIIA delineated IgG1 residues Leu234-Ser239, Asp265-Glu269, Asn297-Thr299, and Ala327-Ile332 as involved in binding to Fc receptor γIIIA. It has been suggested based on crystal structure that in addition to the lower hinge (Leu234-Gly237), residues in IgG CH2 domain loops FG (residues 326-330) and BC (residues 265-271) might play a role in binding to Fc gamma receptor IIA. See Shields et al., J. Biol. Chem., 276(9):6591-6604 (2001). Shields et al. reported that IgG1 residues involved in binding to all human Fc receptors are located in the CH2 domain proximal to the hinge and fall into two categories as follows: 1) positions that may interact directly with all FcR include Leu234-Pro238, Ala327, and Pro329 (and possibly Asp265); 2) positions that influence carbohydrate nature or position include Asp265 and Asn297.

[0782] In some embodiments, the invention contemplates an antibody variant that possesses some but not all effector functions, which make it a desirable candidate for applications in which the half-life of the antibody in vivo is important yet certain effector functions (such as complement and ADCC) are unnecessary or deleterious. In vitro and/or in vivo cytotoxicity assays can be conducted to confirm the effect of one or more Fc amino acid modifications on CDC and/or ADCC activities. For example, Fc receptor (FcR) binding assays can be conducted to ensure that the antibody lacks FcγR binding (hence likely lacking ADCC activity), but retains FcRn binding ability.

Fc Variants with Altered Binding to an Fc Gamma Receptor

[0783] In some instances, exhibits altered affinity for one or more Fc gamma receptors (FcγR). For example, an Fc variant exhibits increased affinity for one or more Fc gamma receptors (FcγR), decreased affinity for one or more Fc gamma receptors (FcγR), or a combination thereof. In one instance, an Fc variant exhibits increased ADCC activity. In yet another example, the Fc region is modified to increase the ability of the antibody to mediate antibody dependent cellular cytotoxicity (ADCC). The binding sites on human IgG1 for Fc gamma RI (FcγRI), Fc gamma RII (FcγRII), Fc gamma RIII (FcγRIIII), and FcRn have been mapped and variants with altered binding have been described. Non-limiting examples of such modifications are described in, for example, U.S. Pat. No. 6,737,056; PCT Publication WO 00/42072 by Presta; Shields, R. L. et al. (2001) J. Biol. Chem. 276:6591-6604; U.S. Pat. No. 7,332,581, etc. In some embodiments, the constant region of the antibodies disclosed herein is replaced with an IGHG1.

[0784] In some embodiments, an Fc variant provided herein that exhibits improved ADCC activity comprises an Fc region with a mutation at amino acid position 298, 333, and/or 334 of the Fc region (using Kabat numbering). In one instance, provided herein is an Fc variant with altered effector and/or Fc-gamma-receptor binding that contain at least one mutation in a human IgG Fc region at amino acid position 238, 239, 248, 249, 252, 254, 255, 256, 258, 265, 267, 268, 269, 270, 272, 276, 278, 280, 283, 285, 286, 289, 290, 292, 294, 295, 296, 298, 301, 303, 305, 307, 309, 312, 315, 320, 322, 324, 326, 327, 329, 330, 331, 333, 334, 335, 337, 338, 340, 360, 373, 376, 378, 382, 388, 389, 398, 414, 416, 419, 430, 434, 435, 437, 438, and/or 439 (using Kabat numbering), which variant displays a receptor binding profile associated with altered ADCC or CDC activity. In one instance, provided herein is an Fc variant that displays reduced binding to a FcγRI, which comprises an amino acid modification at amino acid position 238, 265, 269, 270, 327, and/or 329 (utilizing Kabat numbering). In one instance, provided herein is an Fc variant that displays reduced binding to a FcγRII, that contains an amino acid modification at amino acid position 238, 265, 269, 270, 292, 294, 295, 298, 303, 324, 327, 329, 333, 335, 338, 373, 376, 414, 416, 419, 435, 438, and/or 439 (utilizing Kabat numbering). In one instance, provided herein is an Fc variant that displays increased binding to FcγRII that contains an amino acid modification at amino acid position 255, 256, 258, 267, 268, 272, 276, 280, 283, 285, 286, 290, 301, 305, 307, 309, 312, 315, 320, 322, 326, 330, 331, 337, 340, 378, 398, and/or 430 (utilizing Kabat numbering).

[0785] In one instance, provided herein is an Fc variant that exhibits altered binding to a FcγRII that contains an amino acid modification at amino acid position Arg255, Thr256, Glu258, His268, Ser267, Asp270, Asn276, Glu272, Asp280, His285, Asn286, Lys290, Arg292, Gln295, Ser298, Arg301, Thr307, Leu309, Asn315, Lys322, Lys326, Pro331, Ser337, Ala339, Ala378, and/or Lys414 (utilizing Kabat numbering). In one instance, provided herein is an Fc variant that exhibits reduced binding to a FcγRII that contains an amino acid modification at amino acid position A327Q, A327S, P329A, D265A, and/or D270A (utilizing Kabat numbering). In one instance, provided herein is an Fc variant that displays reduced binding to a FcγRIII, that contains an amino acid modification at amino acid position 238, 239, 248, 249, 252, 254, 265, 268, 269, 270, 272, 278, 289, 293, 294, 295, 296, 301, 303, 322, 327, 329, 338, 340, 373, 376, 382, 388, 389, 416, 434, 435, and/or 437 (utilizing Kabat numbering). In one instance, provided herein is an Fc variant that displays improved binding to FcγRII and FcγRIIIA that contains an amino acid modification at amino acid position T256A and/or K290A (using Kabat numbering).

[0786] In one instance, provided herein is an Fc variant that displays reduced binding to FcγRII and FcγRIIIA that contains an amino acid modification at amino acid position D270A, Q295A, and/or A327S (using Kabat numbering). In one instance, provided herein is an Fc variant that displays improved binding to FcγRII and no effect FcγRIIIA that contains an amino acid modification at amino acid position Kabat numbering). In one instance, provided herein is an Fc variant that displays reduced binding to FcγRII and improved binding to FcγRIIIA that contains an amino acid modification at amino acid position S298A (using Kabat numbering). In one instance, provided herein is an Fc variant that displays improved binding to FcγRII and reduced binding to FcγRIIIA that contains an amino acid modification at amino acid position H268A, R301A, and/or K322A (using Kabat numbering). In one instance, provided herein is an Fc variant that displays reduced binding to FcγRII and no effect on FcγRIIIA that contains an amino acid modification at amino acid position R292A and/or K414A (using Kabat numbering).

[0787] In one instance, provided herein is an Fc variant that displays no effect on FcγRII and reduced binding to FcγRIIIA that contains an amino acid modification at amino acid position S239A, E269A, E293A, V296F, V303A, A327G, K338A, and/or D376A (using Kabat numbering). In one instance, provided herein is an Fc variant that displays increased binding to FcγRIIIA that contains an amino acid modification at amino acid position E333A, K334A, and/or A339T (using Kabat numbering).

[0788] An Fc variant that displays improved binding to a FcγR may also be made and may comprise an amino acid modification at amino acid position 255, 256, 258, 267, 268, 272, 276, 280, 283, 285, 286, 290, 298, 301, 305, 307, 309, 312, 315, 320, 322, 326, 330, 331, 333, 334, 337, 340, 360, 378, 398, and/or 430 (utilizing Kabat numbering). In one instance, provided herein is an Fc variant that displays improved binding to a FcγRIII, and optionally may further display decreased binding to FcγRII, which variant comprises an amino acid modification at amino acid position 298 and/or 333 of an Fc region (utilizing Kabat numbering). In one instance, provided herein is an Fc variant that displays improved binding to a FcγRII that contains an amino acid modification at amino acid position 255, 256, 258, 267, 268, 272, 276, 280, 283, 285, 286, 290, 301, 305, 307, 309, 312, 315, 320, 322, 326, 330, 331, 337, 340, 378, 398 and/or 430 (utilizing Kabat numbering). Such variant may further display decreased binding to FcγRIII if it includes an Fc region amino acid modification at any one or more of amino acid positions 268, 272, 298, 301, 322 or 340 (utilizing Kabat numbering).

[0789] In one instance, a variant described herein contains a mutation at amino acid positions 240, 243, 245, 247, 262, 263, 266, 299, 313, 325, 328, and/or 332 (using Kabat numbering); or at amino acid positions 234, 235, 239, 240, 241, 243, 244, 245, 247, 262, 263, 264, 265, 266, 267, 269, 296, 297, 298, 299, 313, 325, 327, 328, 329, 330, and/or 332 (using Kabat numbering), of which mutations at positions 234, 235, 239, 240, 241, 243, 244, 245, 247, 262, 263, 264, 265, 266, 267, 269, 296, 297, 298, 299, 313, 325, 327, 328, 329, 330, or 332 may reduce ADCC activity or reduce binding to an Fc gamma receptor. In one instant, an Fc variant described herein contains a mutation at amino acid position 234, 235, 239, 240, 243, 264, 266, 328, 330, 332, and/or 325 (using Kabat numbering) that increases ADCC activity, and wherein the Fc variant comprises at least one substitution selected from the group consisting of 234E, 234Y, 234I, 235D, 235S, 235Y, 235I, 239D, 239E, 239N, 239Q, 239T, 240I, 240M, 243L, 264I, 264T, 264Y, 266I, 328M, 328I, 328Q, 328D, 328V, 328T, 330Y, 330L, 330I, 332D, 332E, 332N, 332Q, and 325T.

[0790] In one instance, provided herein is an Fc variant that exhibits altered binding to a FcγRII that contains an amino acid modification at amino acid position Arg255, Thr256, Glu258, His268, Ser267, Asp270, Asn276, Glu272, Asp280, His285, Asn286, Lys290, Arg292, Gln295, Ser298, Arg301, Thr307, Leu309, Asn315, Lys322, Lys326, Pro331, Ser337, Ala339, Ala378, and/or Lys414 (utilizing Kabat numbering). In one instance, provided herein is an Fc variant that exhibits reduced binding to a FcγRII that contains an amino acid modification at amino acid position A327Q, A327S, P329A, D265A, and/or D270A (utilizing Kabat numbering). In one instance, provided herein is an Fc variant that exhibits reduced binding to a FcγRIIIA that contains an amino acid modification at amino acid position Ser239, Ser267 (Gly only), His268, Glu293, Gln295, Tyr296, Arg301, Va1303, Lys338, and/or Asp376 (utilizing Kabat numbering). In one instance, provided herein is an Fc variant that exhibits reduced binding to a FcγRIIA and FcγRIIB that contains an amino acid modification at amino acid position Lys414 (utilizing Kabat numbering). In one instance, provided herein is an Fc variant that exhibits reduced binding to a FcγRIIA and FcγRIIIA that contains an amino acid modification at amino acid position Arg416 (utilizing Kabat numbering). In one instance, provided herein is an Fc variant that exhibits reduced binding to a FcγRIIA and FcγRIIB that contains an amino acid modification at amino acid position Gln419 (utilizing Kabat numbering).

[0791] In one instance, provided herein is an Fc variant that exhibits improved (increased) binding to a FcγRIIIA that contains an amino acid modification at amino acid position Lys360 (utilizing Kabat numbering). Armour et al. (Mol Immunol. 2003; 40(9):585-93) identified IgG1 variants which react with the activating receptor, FcγRIIa, at least 10-fold less efficiently than wildtype IgG1, but whose binding to the inhibitory receptor, FcγRIIb, is only four-fold reduced. Mutations were made in the region of amino acids 233-236 and/or at amino acid positions 327, 330 and 331. See also WO 99/58572. Non-limiting examples of in vitro assays to assess ADCC activity of a molecule of interest are described, for example, in U.S. Pat. Nos. 5,500,362 and 5,821,337. Alternatively, non-radioactive assays methods may be employed (e.g., ACTI™ and CYTOTOX 96® non-radioactive cytotoxicity assays). Useful effector cells for such assays include peripheral blood mononuclear cells (PBMC) and Natural Killer (NK) cells. Alternatively, or additionally, ADCC activity of the molecule of interest may be assessed in vivo, e.g., in an animal model (See, e.g., Clynes et al., Proc. Nat'l Acad. Sci. USA 95:652-656 (1998)).

Fc Variants with Decreased C1q Binding

[0792] In another instance, an Fc variant exhibits reduced C1q binding. C1q binding assays may also be carried out to confirm that the antibody is able or unable bind C1q and, hence, contains or lacks CDC activity (Idusogie et al., J. Immunol. 164: 4178-4184 (2000)). To assess complement activation, a CDC assay may be performed (See, e.g., Gazzano-Santoro et al., J. Immunol. Methods 202:163 (1996); Cragg, M. S. et al., Blood 101:1045-1052 (2003); and Cragg et al., Blood 103:2738-2743 (2004)).

[0793] In another example, one or more amino acids can be replaced with a different amino acid residue such that the antibody has altered C1q binding and/or reduced or abolished complement dependent cytotoxicity (CDC). This approach is described in further detail in U.S. Pat. No. 6,194,551 by Idusogie et al. In another example, one or more amino acid residues are altered to thereby alter the ability of the antibody to fix complement. This approach is described further in PCT Publication WO 94/2935 1 by Bodmer et al. In one instance, an Fc variant provided herein can contain a mutation at amino acid position 329, 331, and/or 322 (using Kabat numbering), and exhibits reduced C1q binding and/or CDC activity. In some instances, C1q binding activity and/or CDC activity of an antibody can be reduced by mutating amino acid residue 318, 320, and/or 322 (using Kabat numbering) of a heavy chain; replacing residue 297 (Asn) may result in removal of lytic activity of an antibody. Cytophilic activity of IgG1 is a property of its heavy chain CH2 domain. In one instance, where an Fc variant is an IgG, amino acid residues 234-237 are maintained as wild type to preserve cytophilic activity of the molecule. An IgG2 antibody containing the entire ELLGGP sequence (residues 233-238) may, in some instances, be more active than wild-type IgG1. In some instances, C1q binding activity and/or lytic activity of an IgG1 antibody can be reduced by mutating amino acid residue Pro331 to Ser. In other instances, C1q binding activity and/or lytic activity of an IgG4 antibody can be reduced by mutating amino acid residue Pro for Ser331 (Xu et al., J Biol Chem. 1994; 269(5):3469-74).

Fc Variants with Interchain Disulfide Binds or Dual Fc Regions

[0794] In yet another embodiment, it may be desirable to modify the antibody of the invention with respect to effector function, so as to enhance the effectiveness of the antibody in treating cancer, for example. For example, one or more cysteine residue(s) may be introduced in the Fc region, thereby allowing interchain disulfide bond formation in this region. The homodimeric antibody thus generated may have improved internalization capability, increased complement-mediated cell killing, and/or antibody-dependent cellular cytotoxicity (ADCC). See Caron et al., J. Exp Med. 176: 1191-1195 (1992) and Shapes, B. J. Immunol. 148: 2918-2922 (1992). Homodimeric antibodies with enhanced anti-tumor activity may also be prepared using heterobifunctional cross-linkers as described in Wolff et al., Cancer Research 53: 2560-2565 (1993). Alternatively, an antibody can be engineered which has dual Fc regions and may thereby have enhanced complement lysis and/or ADCC capabilities. See, Stevenson et al., Anti-Cancer Drug Design 3: 219-230 (1989).

Fc Variants with Increased FcRn Binding and In Vivo Half-Life

[0795] Fc region variants with altered binding affinity for the neonatal receptor (FcRn) are also contemplated herein. Fc region variants with improved affinity for FcRn are anticipated to have longer serum half-lives, and such variants are useful in methods of treating subjects where long half-life of the administered polypeptide is desired, e.g., to treat a chronic disease or disorder. Fc region variants with decreased FcRn binding affinity, on the contrary, are expected to have shorter half-lives, and such variants may be administered to a subject where a shortened circulation time may be preferred, e.g. for in vivo diagnostic imaging or for antibodies which have toxic side effects when left circulating in the blood stream for extended periods, etc.

[0796] Fc region variants with altered binding affinity for FcRn include those that contains an amino acid modification at amino acid position 238, 252, 253, 254, 255, 256, 265, 272, 286, 288, 303, 305, 307, 309, 311, 312, 317, 340, 356, 360, 362, 376, 378, 380, 382, 386, 388, 400, 413, 415, 424, 433, 434, 435, 436, 439, and/or 447 (utilizing Kabat numbering). Fc region variants with decreased FcRn binding affinity are less likely to cross the placenta and, therefore, may be utilized in the treatment of diseases or disorders in pregnant women. In one instance, provided herein is an Fc variant that exhibits reduced binding to FcRn that contains an amino acid modification at amino acid position 252, 253, 254, 255, 288, 309, 386, 388, 400, 415, 433, 435, 436, 439, and/or 447 (utilizing Kabat numbering).

[0797] In one instance, provided herein is an Fc variant that exhibits increased binding to a FcRn that contains an amino acid modification at amino acid position 238, 256, 265, 272, 286, 303, 305, 307, 311, 312, 317, 340, 356, 360, 362, 376, 378, 380, 382, 413, 424, and/or 434 (utilizing Kabat numbering). In one instance, provided herein is an Fc variant that exhibits increased binding to a FcRn that contains an amino acid of Pro238Ala, Thr256Ala, Thr307Ala, Gln311Ala, Asp312Ala, Glu380Ala, Glu382Ala, and/or Asn434Ala (utilizing Kabat numbering). In one instance, provided herein is an Fc variant that exhibits reduced binding to a FcRn that contains a modification at amino acid position Glu233-Gly236, Arg255, Lys288, Ser415, and/or His433 (utilizing Kabat numbering). In one instance, provided herein is an Fc variant that exhibits abrogated binding to a FcRn that contains a modification at amino acid position Ile253, Ser254, His435, and/or Tyr436 (utilizing Kabat numbering). Schuurman et al., Mol Immunol. 2001; 38(1):1-8, incorporated by reference herein in its entirety, report that mutating one of the hinge cysteines involved in the inter-heavy chain bond formation, Cys226, to serine resulted in a more stable inter-heavy chain linkage. Mutating the IgG4 hinge sequence Cys-Pro-Ser-Cys to the IgG1 hinge sequence Cys-Pro-Pro-Cys also markedly stabilizes the covalent interaction between the heavy chains. Angal et al., Mol Immunol. 1993; 30(1):105-8, incorporated by reference herein in its entirety, report that mutating the serine at amino acid position 241 in IgG4 to praline (found at that position in IgG1 and IgG2) led to the production of a homogeneous antibody, as well as extending serum half-life and improving tissue distribution compared to the original chimeric IgG4. Other such examples of Fc region variants are also contemplated (See, e.g., Duncan & Winter, Nature 322:738-40 (1988); Chan C A and Carter P J (2010) Nature Rev Immunol 10:301-316); and Shields et al., J. Biol. Chem. 9(2): 6591-6604 (2001). Determination of FcRn binding and in vivo clearance/half-life can be performed using methods known in the art (See, e.g., Petkova, S. B. et al., Int'l. Immunol. 18(12):1759-1769 (2006)).

### Variants of Antibody Fragments and Salvage Receptor Binding Epitopes

[0798] In certain embodiments of the invention, it may be desirable to use an antibody fragment, rather than an intact antibody, to increase tumor penetration, for example. In this case, it may be desirable to modify the antibody fragment in order to increase its serum half-life, for example, adding molecules such as PEG or other water soluble polymers, including polysaccharide polymers, to antibody fragments to increase the half-life. This may also be achieved, for example, by incorporation of a salvage receptor binding epitope into the antibody fragment (e.g., by mutation of the appropriate region in the antibody fragment or by incorporating the epitope into a peptide tag that is then fused to the antibody fragment at either end or in the middle, e.g., by DNA or peptide synthesis) (see, e.g., WO 96/32478). The salvage receptor binding epitope preferably constitutes a region wherein any one or more amino acid residues from one or two loops of an Fc domain are transferred to an analogous position of the antibody fragment. Even more preferably, three or more residues from one or two loops of the Fc domain are transferred. Still more preferred, the epitope is taken from the CH2 domain of the Fc region (e.g., of an IgG) and transferred to the CHI, CH3, or VH region, or more than one such region, of the antibody. Alternatively, the epitope is taken from the CH2 domain of the Fc region and transferred to the CL region or VL region, or both, of the antibody fragment. See, also, International applications WO 97/34631 and WO 96/32478.

[0799] Thus, antibodies of the invention may comprise a human Fc portion, a human consensus Fc portion, or a variant thereof that retains the ability to interact with the Fc salvage receptor, including variants in which cysteines involved in disulfide bonding are modified or removed, and/or in which the a Met is added at the N-terminus and/or one or more of the N-terminal 20 amino acids are removed, and/or regions that interact with complement, such as the C1q binding site, are removed. Isaacs et al., J Immunol. 1998; 161(8):3862-9, incorporated herein by reference in its entirety, report that mutations within a motif critical for FcγR binding (glutamate 233 to praline, leucine/phenylalanine 234 to valine, and leucine 235 to alanine) completely prevented depletion of target cells. The mutation glutamate 318 to alanine eliminated effector function of mouse IgG2b and also reduced the potency of human IgG4.

### Affinity Maturation

[0800] Affinity maturation involves preparing and screening antibody variants that have substitutions within the CDRs of a parent antibody and selecting variants that have improved biological properties such as binding affinity relative to the parent antibody. A convenient way for generating such substitutional variants is affinity maturation using phage display. Briefly, several hypervariable region sites (e.g. 6-7 sites) are mutated to generate all possible amino substitutions at each site. The antibody variants thus generated are displayed in a monovalent fashion from filamentous phage particles as fusions to the gene III product of M13 packaged within each particle. The phage-displayed variants are then screened for their biological activity (e.g. binding affinity). Alanine scanning mutagenesis can be performed to identify hypervariable region residues that contribute significantly to antigen binding. Alternatively, or in addition, it may be beneficial to analyze a crystal structure of the antigen-antibody complex to identify contact points between the antibody and antigen. Such contact residues and neighboring residues are candidates for substitution according to the techniques elaborated herein. Once such variants are generated, the panel of variants is subjected to screening as described herein and antibodies with superior properties in one or more relevant assays may be selected for further development.

### Altered Glycosylation

[0801] Additionally or alternatively, an antibody can be made that has an altered type of glycosylation, such as a hypofucosylated antibody having reduced amounts of fucosyl residues or an antibody having increased bisecting GlcNac structures. Such altered glycosylation patterns have been demonstrated to increase the ADCC ability of antibodies. Embodiments encompassing glycosylated antibodies or antigen-binding fragments thereof have been described in above sections. Such carbohydrate modifications can be accomplished by, for example, expressing the antibody in a host cell with altered glycosylation machinery. Cells with altered glycosylation machinery have been described in the art and can be used as host cells in which to express recombinant antibodies according to at least some embodiments of the disclosure to thereby produce an antibody with altered glycosylation. For example, the cell lines Ms704, Ms705, and Ms709 lack the fucosyltransferase gene, FUT8 (alpha (1,6) fucosyltransferase), such that antibodies expressed in the Ms704, Ms705, and Ms709 cell lines lack fucose on their carbohydrates. The Ms704, Ms705, and Ms709 FUT8.−/− cell lines are created by the targeted disruption of the FUT8 gene in CHO/DG44 cells using two replacement vectors (see U.S. Patent Publication No. 20040110704 by Yamane et al. and Yamane-Ohnuki et al. (2004) Biotechnol Bioeng 87:614-22). As another example, EP 1,176,195 by Hanai et al. describes a cell line with a functionally disrupted FUT8 gene, which encodes a fucosyl transferase, such that antibodies expressed in such a cell line exhibit hypofucosylation by reducing or eliminating the alpha 1,6 bond-related enzyme. Hanai et al. also describe cell lines which have a low enzyme activity for adding fucose to the N-acetylglucosamine that binds to the Fc region of the antibody or does not have the enzyme activity, for example the rat myeloma cell line YB2/0 (ATCC CRL 1662). PCT Publication WO 03/035835 by Presta describes a variant CHO cell line, Lec13 cells, with reduced ability to attach fucose to Asn(297)-linked carbohydrates, also resulting in hypofucosylation of antibodies expressed in that host cell (see also Shields, R. L. et al. (2002) J. Biol. Chem. 277:26733-26740). PCT Publication WO 99/54342 by Umana et al. describes cell lines engineered to express glycoprotein-modifying glycosyl transferases (e.g., beta(1,4)-N-acetylglucosaminyltransferase III (GnTIII)) such that antibodies expressed in the engineered cell lines exhibit increased bisecting GlcNac structures which results in increased ADCC activity of the antibodies (see also Umana et al. (1999) Nat. Biotech. 17:176-180). Alternatively, the fucose residues of the antibody may be cleaved off using a fucosidase enzyme. For example, the fucosidase alpha-L-fucosidase removes fucosyl residues from antibodies (Tarentino, A. L. et al. (1975) Biochem. 14:5516-23).

### Pegylation

[0802] Another modification of the antibodies herein that is contemplated by the present disclosure is pegylation. An antibody can be pegylated to, for example, increase the biological (e.g., serum) half-life of the antibody. To pegylate an antibody, the antibody, or fragment thereof, typically is reacted with polyethylene glycol (PEG), such as a reactive ester or aldehyde derivative of PEG, under conditions in which one or more PEG groups become attached to the antibody or antibody fragment. Preferably, the pegylation is carried out via an acylation reaction or an alkylation reaction with a reactive PEG molecule (or an analogous reactive water-soluble polymer). As used herein, the term “polyethylene glycol” is intended to encompass any of the forms of PEG that have been used to derivatize other proteins, such as mono (C1-C10) alkoxy- or aryloxy-polyethylene glycol or polyethylene glycol-maleimide. In certain embodiments, the antibody to be pegylated is an aglycosylated antibody. Methods for pegylating proteins are known in the art and can be applied to the antibodies according to at least some embodiments of the invention. See, for example, EP 0 154 316 by Nishimura et al. and EP 0 401 384 by Ishikawa et al.

### Other Covalent Modifications

[0803] Covalent modifications of the antibody are also included within the scope of this invention. They may be made by chemical synthesis or by enzymatic or chemical cleavage of the antibody, if applicable. Other types of covalent modifications of the antibody are introduced into the molecule by reacting targeted amino acid residues of the antibody with an organic derivatizing agent that is capable of reacting with selected side chains or the N- or C-terminal residues.

[0804] Cysteinyl residues most commonly are reacted with a haloacetate (and corresponding amines), such as chloroacetic acid or chloroacetamide, to give carboxymethyl or carboxyamidomethyl derivatives. Cysteinyl residues also are derivatized by reaction with bromotrifluoroacetone, alpha-bromo-(5 imidozoyl)propionic acid, chloroacetyl phosphate, N-alkylmaleimides, 3-nitro-2-pyridyl disulfide, methyl 2-pyridyl disulfide, p-chloromercuribenzoate, 2-chloromercuri-4-nitrophenol, or chloro-7-nitrobenzo-2-oxa-1,3-diazole.

[0805] Histidyl residues are derivatized by reaction with diethylpyrocarbonate at pH 5.5-7.0 because this agent is relatively specific for the histidyl side chain. Para-bromophenacyl bromide also is useful; the reaction is preferably performed in 0.1 M sodium cacodylate at pH 6.0. Lysinyl and amino-terminal residues are reacted with succinic or other carboxylic acid anhydrides. Derivatization with these agents has the effect of reversing the charge of the lysinyl residues. Other suitable reagents for derivatizing alpha amino-containing residues include imidoesters such as methyl picolinimidate, pyridoxal phosphate, pyridoxal, chloroborohydride, trinitrobenzenesulfonic acid, methylisourea, 2,4-pentanedione, and transaminase-catalyzed reaction with glyoxylate.

[0806] Arginyl residues are modified by reaction with one or several conventional reagents, among them phenylgly-oxal, 2,3-butanedione, 1,2-cyclohexanedione, and ninhydrin. Derivatization of arginine residues requires that the reaction be performed in alkaline conditions because of the high pKa of the guanidine functional group. Furthermore, these reagents may react with the groups of lysine as well as the arginine epsilon-amino group.

[0807] The specific modification of tyrosyl residues may be made, with particular interest in introducing spectral labels into tyrosyl residues by reaction with aromatic diazonium compounds or tetranitromethane. Most commonly, N-acetylimidizole and tetranitromethane are used to form 0-acetyl tyrosyl species and 3-nitro derivatives, respectively. Tyrosyl residues are iodinated using 125I or 131I to prepare labeled proteins for use in radioimmunoassay. Carboxyl side groups (aspartyl or glutamyl) are selectively modified by reaction with carbodiimides (R—N═C═N—R′), where R and R′ are different alkyl groups, such as 1-cyclohexyl-3-(2-morpholinyl-4-ethyl) carbodiimide or 1-ethyl-3-(4-azonia-4,4-dimethylpentyl)carbodiimide. Furthermore, aspartyl and glutamyl residues are converted to asparaginyl and glutaminyl residues by reaction with ammonium ions.

[0808] Glutaminyl and asparaginyl residues are frequently deamidated to the corresponding glutamyl and aspartyl residues, respectively. These residues are deamidated under neutral or basic conditions. The deamidated form of these residues falls within the scope of this invention. Other modifications include hydroxylation of proline and lysine, phosphorylation of hydroxyl groups of seryl or threonyl residues, methylation of the alpha amino groups of lysine, arginine, and histidine side chains (T. E. Creighton, Proteins: Structure and Molecular Properties, W.H. Freeman & Co., San Francisco, pp. 79-86 (1983)), acetylation of the N-terminal amine, and amidation of any C-terminal carboxyl group.

[0809] Another type of covalent modification involves chemically or enzymatically coupling glycosides to the antibody. These procedures are advantageous in that they do not require production of the antibody in a host cell that has glycosylation capabilities for N- or O-linked glycosylation. Depending on the coupling mode used, the sugar(s) may be attached to (a) arginine and histidine, (b) free carboxyl groups, (c) free sulfhydryl groups such as those of cysteine, (d) free hydroxyl groups such as those of serine, threonine, or hydroxyproline, (e) aromatic residues such as those of phenylalanine, tyrosine, or tryptophan, or (f) the amide group of glutamine. These methods are described in WO 87/05330 published 11 Sep. 1987, and in Aplin and Wriston, CRC Crit. Rev. Biochem., pp. 259-306 (1981).

[0810] Removal of any carbohydrate moieties present on the antibody may be accomplished chemically or enzymatically. Chemical deglycosylation requires exposure of the antibody to the compound trifluoromethanesulfonic acid, or an equivalent compound. This treatment results in the cleavage of most or all sugars except the linking sugar (N-acetyl-glucosamine or N-acetylgalactosamine), while leaving the antibody intact. Chemical deglycosylation is described by Hakimuddin, et al. Arch. Biochem. Biophys. 259: 52 (1987) and by Edge et al. Anal. Biochem., 118: 131 (1981). Enzymatic cleavage of carbohydrate moieties on antibodies can be achieved by the use of a variety of endo- and exoglycosidases as described by Thotakura et al. Meth. Enzymol. 138: 350 (1987). Another type of covalent modification of the antibody comprises linking the antibody to one of a variety of nonproteinaceous polymers, e.g., polyethylene glycol, poly-propylene glycol, polyoxyethylated polyols, polyoxyethylated sorbitol, polyoxyethylated glucose, polyoxyethylated glycerol, polyoxyalkylenes, or polysaccharide polymers such as dextran. Such methods are known in the art, see, e.g. U.S. Pat. Nos. 4,640,835; 4,496,689; 4,301,144; 4,670,417; 4,791,192, 4,179,337, 4,766,106, 4,179,337, 4,495,285, 4,609,546 or EP 315 456.

### Computationally Reconstructed Antibodies

[0811] Provided herein are reconstructed polypeptide and nucleic acid consensus sequences for cancer associated antibodies. The consensus sequences are reconstructed in silico. The term “polypeptide consensus sequence” as used herein refers to an amino acid sequence which comprises the most frequently occurring amino acid residues at each location in all immunoglobulins of any particular subclass or subunit structure. The polypeptide consensus sequence may be based on immunoglobulins of a particular species or of many species. A polypeptide “consensus” sequence, “consensus” structure, or “consensus” antibody is understood to encompass a human polypeptide consensus sequence as described in certain embodiments provided herein, and to refer to an amino acid sequence which comprises the most frequently occurring amino acid residues at each location in all human immunoglobulins of any particular subclass or subunit structure. The embodiments herein provide consensus human structures and consensus structures, which consider other species in addition to human.

[0812] The term, “nucleic acid consensus sequence” as used herein refers to a nucleic acid sequence, which comprises the most frequently occurring nucleotide residues at each location in all immunoglobulin nucleic acid sequence of any particular subclass or subunit structure. The nucleic acid consensus sequence may be based on immunoglobulins of a particular species or of many species. A nucleic acid “consensus” sequence, or “consensus” structure, is understood to encompass a human nucleic acid consensus sequence as described in certain embodiments of this invention, and to refer to a nucleic acid sequence which comprises the most frequently occurring nucleotide residues at each location in all human immunoglobulins nucleic acid of any particular subclass or subunit structure.

[0813] Provided herein are consensus human structures and consensus structures of other species in addition to human. Methods to computationally reconstruct the consensus sequences from RNA seq data are described in the examples herein. Non limiting examples of computational tools known in the art for reconstructing full-length antibody repertoires including MIGEC (Shugay et al. 2014), PRESTO (Vander Heiden et al. 2014), MiXCR (Bolotin et al. 2015), and IGREPERTOIRECONSTRUCTOR (Safonova et al. 2015). In some embodiments, the TraCeR pipeline by Stubbington and Teichmann is implemented, which uses de novo assembly after a pre-filtering step against a custom database containing in silico combinations for all known human V and J gene segments/alleles in the International Immunogenetics Information System (IMGT) repository. In some embodiments, another pipeline, VDJPuzzle, is implemented which filters in reads by mapping to TCR genes followed by a Trinity-based assembly; whereby the total reads are then mapped back to the assemblies in order to retrieve reads missed in the initial mapping step, followed by another round of assembly with Trinity. An exemplary method for computationally reconstructing consensus sequences can comprise somatic sequence identification, manual IGV investigation and (if necessary) correction of somatic vdj sequence and identification of germline sequence and CDR regions.

[0814] In some embodiments, RNA-seq FASTQ files retrieved for patients e.g., a cancer patient are recorded and analyzed. Kallisto, BWA, MiXCR or other known tools can be used, in some embodiments, to perform a first alignment of RNA-seq samples to reference V, D and J genes of immunoglobulins in order to identify the repertoire present in the samples. In further embodiments, identical CDR3 sequences are identified and grouped in clonotypes (Bolotin D A et al., Nature Methods, 2015; Bolotin D A et al. Nature Biotechnology, 2017). VDJ tools are used, in some embodiments, (Shugay M. et al. PLoS Computational Biology, 2015) to filter out non-functional (non-coding) clonotypes and to compute basic diversity statistics. In further embodiments, non-functional clonotypes are identified as those containing a stop codon or frameshift in their receptor sequence. In some embodiments, the diversity of the Ig repertoire is obtained based on the effective number of species which is calculated as the exponent of the Shannon-Wiener Entropy index (MacArthur RH. Biological reviews. 1965).

[0815] In some embodiments, further alignments against the immunoglobulin segments present in the samples are performed for viewing the results to explore the frequency distribution of sequence mismatches along the V, D, J gene segments and, in particular in the CDR3 region length statistics. This alignment step can be useful, for example, for summarizing repertoires, as well as offering a detailed view of rearrangements and region alignments for individual query sequences. Exemplary methodology for alignment and assembly is described in the examples herein.

[0816] In some embodiments, the immunoglobulin segments present in the samples are identified using IMGT reference files or equivalent. In some instances, the heavy D segment and light V-J junction sequences can be assembled using an assembler. Non limiting examples of assembler known in the art include Trinity and V′DJer. A FASTA file with corrected heavy D and light V-J junction sequences can be generated for each sample in some embodiments. In addition to the assembled FASTA files, germline FASTA files can be generated, for example, by using IgBLAST v1.9.0 [Ye J, et al Nucleic Acids Research, 2013] and the IMGT database. In further embodiments, the somatic FASTA sequence can be input to IgBLAST to obtain the closest segment ids for the heavy and light chain. The germline FASTA can be generated by merging corresponding segment sequences from the IMGT database. The final assembled FASTA sequences can serve as ‘reference’ sequences for the alignment and visualization steps.

[0817] In further embodiments, using the reference files generated from the assembly step, the FASTQs can be aligned in BowTie2 default mode. Other alignment tools, known in the art, for example STAR or TopHat2 can also be used. The output BAM file can be used for IGV visualization and mutations in the patient can be observed.

[0818] In further embodiments, the identification of the CDR3 region and corresponding V, D, and J chains from the final assembled FASTA sequences can be done, for example with IgBLAST. The standardized output using version v. 1.9.0 of IgBLAST can be delivered by wrapping IgBLASTn with default parameters in some instances. In other instances, the output from the IgBLAST service can be extracted using a purpose-built parser tool designed to extract the CDR1, CDR2 and CDR3 nucleotide and amino acid sequences.

### Exemplary Cancer Associated Antibodies or Antigen-Binding Fragments Thereof

[0819] The present disclosure provides cancer associated antibodies comprising a consensus sequence. In some embodiments, the antibodies or antigen-binding fragment thereof induce lysis of cancer cells. Lysis can be induced by any mechanism, such as by mediating an effector function, such as C1q binding and complement dependent cytotoxicity (CDC); Fc receptor binding; antibody-dependent cell-mediated cytotoxicity (ADCC); phagocytosis, or direct induction of cell apoptosis.

[0820] In some embodiments, an antibody or antigen-binding fragment thereof, disclosed herein, is engineered to have at least one increase in effector function as compared to the non-engineered parent antibody or antigen-binding fragment thereof. Effector functions are biological activities attributable to the Fc region of an antibody, which vary with the antibody isotype. Examples of antibody effector functions include: C1q binding and complement dependent cytotoxicity (CDC); Fc receptor binding; antibody-dependent cell-mediated cytotoxicity (ADCC); phagocytosis. For example, an antibody or antigen-binding fragment thereof, disclosed herein can be glycoengineered to have at least one increase in effector function as compared to the non-glycoengineered parent. Antibody-dependent cellular cytotoxicity (ADCC) is the result of the formation of a complex between the IgG Fab portion of the antibody with the viral protein on the cell surface and binding of the Fc portion to the Fc receptors (FcγRs), on effector cells. The increase in effector function can be increased binding affinity to an Fc receptor, increased ADCC; increased cell mediated immunity; increased binding to cytotoxic CD8 T cells; increased binding to NK cells; increased binding to macrophages; increased binding to polymorphonuclear cells; increased binding to monocytes; increased binding to macrophages; increased binding to large granular lymphocytes; increased binding to granulocytes; direct signaling inducing apoptosis; increased dendritic cell maturation; or increased T cell priming.

### Exemplary Sequences of the Antibodies of the Disclosure and Antigen Binding Fragments Thereof

[0821] In one aspect, an antibody or antigen-binding fragment thereof is provided, wherein the antibody or antigen-binding fragment thereof comprises a heavy chain variable domain (VH) having at least 90%, 91%, 92%, 93%, 94%, 95%, 96%, 97%, 98%, 99%, or 100% sequence identity to the amino acid sequence of any one of SEQ ID NOs: 1-271. In some embodiments, a VH sequence having at least 90%, 91%, 92%, 93%, 94%, 95%, 96%, 97%, 98%, or 99% identity contains substitutions (e.g., conservative substitutions), insertions, or deletions relative to the reference sequence, but an antibody or antigen-binding fragment thereof comprising that sequence retains the ability to bind to same antigen as of the parent (e.g., cancer associated antigen). In some embodiments, a total of 1 to 10 amino acids have been substituted, inserted and/or deleted in the amino acid sequence of any one of SEQ ID NOs: 1-271. In some embodiments, substitutions, insertions, or deletions occur in regions outside the CDRs (e.g., in the FRs). Optionally, the antibody or antigen-binding fragment thereof comprises the VH sequence of any one of SEQ ID NOs: 1-271, including one or more post-translational modifications of that sequence. In a particular embodiment, the VH comprises one, two or three CDRs selected from: (a) CDR-H1, comprising the amino acid sequence of any one of SEQ ID NOs: 543-813, (b) CDR-H2, comprising the amino acid sequence of any one of SEQ ID NOs: 1085-1355; and (c) CDR-H3, comprising the amino acid sequence of any one of SEQ ID NOs: 1627-1897.

[0822] In one aspect, an antibody or antigen-binding fragment thereof is provided, wherein the antibody or antigen-binding fragment thereof comprises a light chain variable domain (VL) having at least 90%, 91%, 92%, 93%, 94%, 95%, 96%, 97%, 98%, 99%, or 100% sequence identity to the amino acid sequence of any one of SEQ ID NOs: 272-542. In some embodiments, a VL sequence having at least 90%, 91%, 92%, 93%, 94%, 95%, 96%, 97%, 98%, or 99% identity contains substitutions (e.g., conservative substitutions), insertions, or deletions relative to the reference sequence, but an antibody or antigen-binding fragment thereof comprising that sequence retains the ability to bind to same antigen as the parent (e.g., cancer associated antigen). In some embodiments, a total of 1 to 10 amino acids have been substituted, inserted and/or deleted in the amino acid sequence of any one of SEQ ID NOs: 272-542. In some embodiments, the substitutions, insertions, or deletions occur in regions outside the CDRs (e.g., in the FRs). Optionally, the antibody or antigen-binding fragment thereof comprises the VL sequence of any one of SEQ ID NOs: 272-542, including one or more post-translational modifications of that sequence. In a particular embodiment, the VL comprises one, two or three CDRs selected from: (a) CDR-L1, comprising the amino acid sequence of any one of SEQ ID NOs: 814-1084; (b) CDR-L2, comprising the amino acid sequence of any one of SEQ ID NOs: 1356-1626; and (c) CDR-L3, comprising the amino acid sequence of any one of SEQ ID NOs: 1898-2168.

[0823] In one aspect, an antibody or antigen-binding fragment thereof is provided, wherein the antibody or antigen-binding fragment thereof comprises: a. a VH as in any of the embodiments provided above, and b. a VL as in any of the embodiments provided above, and wherein the selected VH and VL are paired according to table 5. In one aspect, an antibody or antigen-binding fragment thereof is provided, wherein the antibody or antigen-binding fragment thereof comprises: a. a CDR-H1 selected from any CDR-H1 in table 1, and b. a CDR-L1 selected from any CDR-L1 in table 1, wherein the selected CDR-H1 and CDR-L1 are paired according to table 5. In one aspect, an antibody or antigen-binding fragment thereof is provided, wherein the antibody or antigen-binding fragment thereof comprises: a. a CDR-H2 selected from any CDR-H2 in table 1, and b. a CDR-L2 selected from any CDR-L2 in table 1, wherein the selected CDR-H2 and CDR-L2 are paired according to table 5. In one aspect, an antibody or antigen-binding fragment thereof is provided, wherein the antibody or antigen-binding fragment thereof comprises: a. a CDR-H3 selected from any CDR-H3 in table 1, and b. a CDR-L3 selected from any CDR-L3 in table 1, wherein the selected CDR-H3 and CDR-L3 are paired according to table 5. In one aspect, an antibody or antigen-binding fragment thereof is provided, wherein the antibody or antigen-binding fragment thereof comprises: a. a CDR-H1, a CDR-H2, and a CDR-H3 selected from any CDR-H1, a CDR-H2, and a CDR-H3 in table 1, and b. a CDR-L1, a CDR-L2, and a CDR-L3 selected from any CDR-L1, CDR-L2, or CDR-L3 in table 1, wherein the selected CDR-H1, CDR-H2, CDR-H3, CDR-L1, CDR-L2, and CDR-L3 are paired according to table 1.

### TBLA1001

[0824] In one aspect, the present disclosure provides an antibody or antigen-binding fragment thereof comprising at least one or both variable regions selected from the group consisting of (a) VH comprising the amino acid sequence of SEQ ID NO: 1; and (b) VL comprising the amino acid sequence of SEQ ID NO: 272.

[0825] In one aspect, the present disclosure provides an antibody or antigen-binding fragment thereof comprising at least one, two, three, four, five, or six CDRs selected from the group consisting of: (a) CDR-H1 comprising the amino acid sequence of SEQ ID NO: 543, (b) CDR-H2 comprising the amino acid sequence of SEQ ID NO: 1085, (c) CDR-H3 comprising the amino acid sequence of SEQ ID NO: 1627, (d) CDR-L1 comprising the amino acid sequence of SEQ ID NO: 814, (e) CDR-L2 comprising the amino acid sequence of SEQ ID NO: 1356, and (f) CDR-L3 comprising the amino acid sequence of SEQ ID NO: 1898.

[0826] In one aspect, the present disclosure provides an antibody or antigen-binding fragment thereof comprising a. CDR-H1 comprising the amino acid sequence of SEQ ID NO: 543, (b) CDR-H2 comprising the amino acid sequence of SEQ ID NO: 1085, (c) CDR-H3 comprising the amino acid sequence of SEQ ID NO: 1627, (d) CDR-L1 comprising the amino acid sequence of SEQ ID NO: 814, (e) CDR-L2 comprising the amino acid sequence of SEQ ID NO: 1356, and (f) CDR-L3 comprising the amino acid sequence of SEQ ID NO: 1898.

[0827] In one aspect, the present disclosure provides an antibody or antigen-binding fragment thereof comprising CDR-H3 comprising the amino acid sequence of SEQ ID NO: 1627, and CDR-L3 comprising the amino acid sequence of SEQ ID NO: 1898.

[0828] In one aspect, the present disclosure provides an antibody or antigen-binding fragment thereof comprising at least one, at least two, or all three VH CDR sequences selected from: a. CDR-H1 comprising the amino acid sequence of SEQ ID NO: 543; b. CDR-H2 comprising the amino acid sequence of SEQ ID NO: 1085; c. CDR-H3 comprising the amino acid sequence of SEQ ID NO: 1627; and a VL comprising the amino acid sequence of SEQ ID NO: 272.

[0829] In one aspect, the present disclosure provides an antibody or antigen-binding fragment thereof comprising at least one, at least two, or all three VL CDR sequences selected from: a. CDR-L1 comprising the amino acid sequence of SEQ ID NO: 814; b. CDR-L2 comprising the amino acid sequence of SEQ ID NO: 1356; c. CDR-L3 comprising the amino acid sequence of SEQ ID NO: 1898; and a VH comprising the amino acid sequence of SEQ ID NO: 1.

[0830] In one aspect, an antibody or antigen-binding fragment thereof is provided, wherein the antibody or antigen-binding fragment thereof comprises a heavy chain variable domain (VH) having at least 90%, 91%, 92%, 93%, 94%, 95%, 96%, 97%, 98%, 99%, or 100% sequence identity to the amino acid sequence SEQ ID NO: 1. In some embodiments, a VH sequence having at least 90%, 91%, 92%, 93%, 94%, 95%, 96%, 97%, 98%, or 99% identity contains substitutions (e.g., conservative substitutions), insertions, or deletions relative to the reference sequence, but an antibody or antigen-binding fragment thereof comprising that sequence retains the ability to bind to same antigen as of the parent (e.g., cancer associated antigen). In some embodiments, a total of 1 to 10 amino acids have been substituted, inserted and/or deleted in the amino acid sequence SEQ ID NO: 1. In some embodiments, substitutions, insertions, or deletions occur in regions outside the CDRs (e.g., in the FRs). Optionally, the antibody or antigen-binding fragment thereof comprises the VH sequence SEQ ID NO: 1, including one or more post-translational modifications of that sequence. In a particular embodiment, the VH comprises one, two or three CDRs selected from: a. CDR-H1, comprising the amino acid sequence SEQ ID NO: 543; b. CDR-H2, comprising the amino acid sequence SEQ ID NO: 1085; and c. CDR-H3, comprising the amino acid sequence SEQ ID NO: 1627.

[0831] In one aspect, an antibody or antigen-binding fragment thereof is provided, wherein the antibody or antigen-binding fragment thereof comprises a light chain variable domain (VL) having at least 90%, 91%, 92%, 93%, 94%, 95%, 96%, 97%, 98%, 99%, or 100% sequence identity to the amino acid sequence SEQ ID NO: 272. In some embodiments, a VL sequence having at least 90%, 91%, 92%, 93%, 94%, 95%, 96%, 97%, 98%, or 99% identity contains substitutions (e.g., conservative substitutions), insertions, or deletions relative to the reference sequence, but an antibody or antigen-binding fragment thereof comprising that sequence retains the ability to bind to same antigen as the parent (e.g., cancer associated antigen). In some embodiments, a total of 1 to 10 amino acids have been substituted, inserted and/or deleted in the amino acid sequence SEQ ID NO: 272. In some embodiments, the substitutions, insertions, or deletions occur in regions outside the CDRs (e.g., in the FRs). Optionally, the antibody or antigen-binding fragment thereof comprises the VL sequence SEQ ID NO: 272, including one or more post-translational modifications of that sequence. In a particular embodiment, the VL comprises one, two or three CDRs selected from: a. CDR-L1, comprising the amino acid sequence SEQ ID NO: 814; b. CDR-L2, comprising the amino acid sequence SEQ ID NO: 1356; and c. CDR-L3, comprising the amino acid sequence SEQ ID NO: 1898.

[0832] In one aspect, an antibody or antigen-binding fragment thereof is provided, wherein the antibody or antigen-binding fragment thereof comprises a VH as in any of the embodiments provided above, and a VL as in any of the embodiments provided above. In some embodiments, the antibody or antigen-binding fragment thereof comprises the VH amino acid sequence of SEQ ID NO: 1, and the VL amino acid sequence of SEQ ID NO: 272, optionally including post-translational modifications of those sequences.

### TBLA1002

[0833] In one aspect, the present disclosure provides an antibody or antigen-binding fragment thereof comprising at least one or both variable regions selected from: a. VH comprising the amino acid sequence of SEQ ID NO: 2; and b. VL comprising the amino acid sequence of SEQ ID NO: 273.

[0834] In one aspect, the present disclosure provides an antibody or antigen-binding fragment thereof comprising at least one, two, three, four, five, or six CDRs selected from: a. CDR-H1 comprising the amino acid sequence of SEQ ID NO: 544; b. CDR-H2 comprising the amino acid sequence of SEQ ID NO: 1086, c. CDR-H3 comprising the amino acid sequence of SEQ ID NO: 1628; d. CDR-L1 comprising the amino acid sequence of SEQ ID NO: 815; e. CDR-L2 comprising the amino acid sequence of SEQ ID NO: 1357; and f. CDR-L3 comprising the amino acid sequence of SEQ ID NO: 1899.

[0835] In one aspect, the present disclosure provides an antibody or antigen-binding fragment thereof comprising: a. CDR-H1 comprising the amino acid sequence of SEQ ID NO: 544; b. CDR-H2 comprising the amino acid sequence of SEQ ID NO: 1086, c. CDR-H3 comprising the amino acid sequence of SEQ ID NO: 1628; d. CDR-L1 comprising the amino acid sequence of SEQ ID NO: 815; e. CDR-L2 comprising the amino acid sequence of SEQ ID NO: 1357; and f. CDR-L3 comprising the amino acid sequence of SEQ ID NO: 1899. In one aspect, the present disclosure provides an antibody or antigen-binding fragment thereof comprising CDR-H3 comprising the amino acid sequence of SEQ ID NO: 1628; and CDR-L3 comprising the amino acid sequence of SEQ ID NO: 1899.

[0836] In one aspect, the present disclosure provides an antibody or antigen-binding fragment thereof comprising at least one, at least two, or all three VH CDR sequences selected from: a. CDR-H1 comprising the amino acid sequence of SEQ ID NO: 544; b. CDR-H2 comprising the amino acid sequence of SEQ ID NO: 1086; c. CDR-H3 comprising the amino acid sequence of SEQ ID NO: 1628; and a VL comprising the amino acid sequence of SEQ ID NO: 273.

[0837] In one aspect, the present disclosure provides an antibody or antigen-binding fragment thereof comprising at least one, at least two, or all three VL CDR sequences selected from: a. CDR-L1 comprising the amino acid sequence of SEQ ID NO: 815; b. CDR-L2 comprising the amino acid sequence of SEQ ID NO: 1357; c. CDR-L3 comprising the amino acid sequence of SEQ ID NO: 1899, and a VH comprising the amino acid sequence of SEQ ID NO: 2.

[0838] In one aspect, an antibody or antigen-binding fragment thereof is provided, wherein the antibody or antigen-binding fragment thereof comprises a heavy chain variable domain (VH) having at least 90%, 91%, 92%, 93%, 94%, 95%, 96%, 97%, 98%, 99%, or 100% sequence identity to the amino acid sequence SEQ ID NO: 2. In some embodiments, a VH sequence having at least 90%, 91%, 92%, 93%, 94%, 95%, 96%, 97%, 98%, or 99% identity contains substitutions (e.g., conservative substitutions), insertions, or deletions relative to the reference sequence, but an antibody or antigen-binding fragment thereof comprising that sequence retains the ability to bind to same antigen as of the parent (e.g., cancer associated antigen). In some embodiments, a total of 1 to 10 amino acids have been substituted, inserted and/or deleted in the amino acid sequence SEQ ID NO: 2. In some embodiments, substitutions, insertions, or deletions occur in regions outside the CDRs (e.g., in the FRs). Optionally, the antibody or antigen-binding fragment thereof comprises the VH sequence SEQ ID NO: 2, including one or more post-translational modifications of that sequence. In a particular embodiment, the VH comprises one, two or three CDRs selected from: a. CDR-H1, comprising the amino acid sequence SEQ ID NO: 544; b. CDR-H2, comprising the amino acid sequence SEQ ID NO: 1086; and c. CDR-H3, comprising the amino acid sequence SEQ ID NO: 1628.

[0839] In one aspect, an antibody or antigen-binding fragment thereof is provided, wherein the antibody or antigen-binding fragment thereof comprises a light chain variable domain (VL) having at least 90%, 91%, 92%, 93%, 94%, 95%, 96%, 97%, 98%, 99%, or 100% sequence identity to the amino acid sequence SEQ ID NO: 273. In some embodiments, a VL sequence having at least 90%, 91%, 92%, 93%, 94%, 95%, 96%, 97%, 98%, or 99% identity contains substitutions (e.g., conservative substitutions), thereof comprising that sequence retains the ability to bind to same antigen as the parent (e.g., cancer associated antigen). In some embodiments, a total of 1 to 10 amino acids have been substituted, inserted and/or deleted in the amino acid sequence SEQ ID NO: 273. In some embodiments, the substitutions, insertions, or deletions occur in regions outside the CDRs (e.g., in the FRs). Optionally, the antibody or antigen-binding fragment thereof comprises the VL sequence SEQ ID NO: 273, including one or more post-translational modifications of that sequence. In a particular embodiment, the VL comprises one, two or three CDRs selected from: a. CDR-L1, comprising the amino acid sequence SEQ ID NO: 815; b. CDR-L2, comprising the amino acid sequence SEQ ID NO: 1357; and c. CDR-L3, comprising the amino acid sequence SEQ ID NO: 1899.

[0840] In one aspect, an antibody or antigen-binding fragment thereof is provided, wherein the antibody or antigen-binding fragment thereof comprises a VH as in any of the embodiments provided above, and a VL as in any of the embodiments provided above. In some embodiments, the antibody or antigen-binding fragment thereof comprises the VH amino acid sequence of SEQ ID NO: 2, and the VL amino acid sequence of SEQ ID NO: 273, optionally including post-translational modifications of those sequences.

### TBLA1003

[0841] In one aspect, the present disclosure provides an antibody or antigen-binding fragment thereof comprising at least one or both variable regions selected from: a. VH comprising the amino acid sequence of SEQ ID NO: 3; and b. VL comprising the amino acid sequence of SEQ ID NO: 274.

[0842] In one aspect, the present disclosure provides an antibody or antigen-binding fragment thereof comprising at least one, two, three, four, five, or six CDRs selected from: a. CDR-H1 comprising the amino acid sequence of SEQ ID NO: 545; b. CDR-H2 comprising the amino acid sequence of SEQ ID NO: 1087; c. CDR-H3 comprising the amino acid sequence of SEQ ID NO: 1629; d. CDR-L1 comprising the amino acid sequence of SEQ ID NO: 816; e. CDR-L2 comprising the amino acid sequence of SEQ ID NO: 1358; and f. CDR-L3 comprising the amino acid sequence of SEQ ID NO: 1900.

[0843] In one aspect, the present disclosure provides an antibody or antigen-binding fragment thereof comprising: a. CDR-H1 comprising the amino acid sequence of SEQ ID NO: 545; b. CDR-H2 comprising the amino acid sequence of SEQ ID NO: 1087; c. CDR-H3 comprising the amino acid sequence of SEQ ID NO: 1629; d. CDR-L1 comprising the amino acid sequence of SEQ ID NO: 816; e. CDR-L2 comprising the amino acid sequence of SEQ ID NO: 1358; and f. CDR-L3 comprising the amino acid sequence of SEQ ID NO: 1900. In one aspect, the present disclosure provides an antibody or antigen-binding fragment thereof comprising CDR-H3 comprising the amino acid sequence of SEQ ID NO: 1629; and CDR-L3 comprising the amino acid sequence of SEQ ID NO: 1900.

[0844] In one aspect, the present disclosure provides an antibody or antigen-binding fragment thereof comprising at least one, at least two, or all three VH CDR sequences selected from: a. CDR-H1 comprising the amino acid sequence of SEQ ID NO: 545; b. CDR-H2 comprising the amino acid sequence of SEQ ID NO: 1087; c. CDR-H3 comprising the amino acid sequence of SEQ ID NO: 1629; and a VL comprising the amino acid sequence of SEQ ID NO: 274.

[0845] In one aspect, the present disclosure provides an antibody or antigen-binding fragment thereof comprising at least one, at least two, or all three VL CDR sequences selected from: a. CDR-L1 comprising the amino acid sequence of SEQ ID NO: 816; b. CDR-L2 comprising the amino acid sequence of SEQ ID NO: 1358; c. CDR-L3 comprising the amino acid sequence of SEQ ID NO: 1900; and a VH comprising the amino acid sequence of SEQ ID NO: 3.

[0846] In one aspect, an antibody or antigen-binding fragment thereof is provided, wherein the antibody or antigen-binding fragment thereof comprises a heavy chain variable domain (VH) having at least 90%, 91%, 92%, 93%, 94%, 95%, 96%, 97%, 98%, 99%, or 100% sequence identity to the amino acid sequence SEQ ID NO: 3. In some embodiments, a VH sequence having at least 90%, 91%, 92%, 93%, 94%, 95%, 96%, 97%, 98%, or 99% identity contains substitutions (e.g., conservative substitutions), insertions, or deletions relative to the reference sequence, but an antibody or antigen-binding fragment thereof comprising that sequence retains the ability to bind to same antigen as of the parent (e.g., cancer associated antigen). In some embodiments, a total of 1 to 10 amino acids have been substituted, inserted and/or deleted in the amino acid sequence SEQ ID NO: 3. In some embodiments, substitutions, insertions, or deletions occur in regions outside the CDRs (e.g., in the FRs). Optionally, the antibody or antigen-binding fragment thereof comprises the VH sequence SEQ ID NO: 3, including one or more post-translational modifications of that sequence. In a particular embodiment, the VH comprises one, two or three CDRs selected from: a. CDR-H1, comprising the amino acid sequence SEQ ID NO: 545; b. CDR-H2, comprising the amino acid sequence SEQ ID NO: 1087; and c. CDR-H3, comprising the amino acid sequence SEQ ID NO: 1629.

[0847] In one aspect, an antibody or antigen-binding fragment thereof is provided, wherein the antibody or antigen-binding fragment thereof comprises a light chain variable domain (VL) having at least 90%, 91%, 92%, 93%, 94%, 95%, 96%, 97%, 98%, 99%, or 100% sequence identity to the amino acid sequence SEQ ID NO: 274. In some embodiments, a VL sequence having at least 90%, 91%, 92%, 93%, 94%, 95%, 96%, 97%, 98%, or 99% identity contains substitutions (e.g., conservative substitutions), insertions, or deletions relative to the reference sequence, but an antibody or antigen-binding fragment thereof comprising that sequence retains the ability to bind to same antigen as the parent (e.g., cancer associated antigen). In some embodiments, a total of 1 to 10 amino acids have been substituted, inserted and/or deleted in the amino acid sequence SEQ ID NO: 274. In some embodiments, the substitutions, insertions, or deletions occur in regions outside the CDRs (e.g., in the FRs). Optionally, the antibody or antigen-binding fragment thereof comprises the VL sequence SEQ ID NO: 274, including one or more post-translational modifications of that sequence. In a particular embodiment, the VL comprises one, two or three CDRs selected from: a CDR-L1, comprising the amino acid sequence SEQ ID NO: 816; b. CDR-L2, comprising the amino acid sequence SEQ ID NO: 1358; and c. CDR-L3, comprising the amino acid sequence SEQ ID NO: 1900.

[0848] In one aspect, an antibody or antigen-binding fragment thereof is provided, wherein the antibody or antigen-binding fragment thereof comprises a VH as in any of the embodiments provided above, and a VL as in any of the embodiments provided above. In some embodiments, the antibody or antigen-binding fragment thereof comprises the VH amino acid sequence of SEQ ID NO: 3, and the VL amino acid sequence of SEQ ID NO: 274, optionally including post-translational modifications of those sequences.

### TBLA1004

[0849] In one aspect, the present disclosure provides an antibody or antigen-binding fragment thereof comprising at least one or both variable regions selected from: a VH comprising the amino acid sequence of SEQ ID NO: 4; and b. a VL comprising the amino acid sequence of SEQ ID NO: 275.

[0850] In one aspect, the present disclosure provides an antibody or antigen-binding fragment thereof comprising at least one, two, three, four, five, or six CDRs selected from: a. CDR-H1 comprising the amino acid sequence of SEQ ID NO: 546; b. CDR-H2 comprising the amino acid sequence of SEQ ID NO: 1088; c. CDR-H3 comprising the amino acid sequence of SEQ ID NO: 1630; d. CDR-L1 comprising the amino acid sequence of SEQ ID NO: 817; e. CDR-L2 comprising the amino acid sequence of SEQ ID NO: 1359; and f. CDR-L3 comprising the amino acid sequence of SEQ ID NO: 1901.

[0851] In one aspect, the present disclosure provides an antibody or antigen-binding fragment thereof comprising CDR-H3 comprising the amino acid sequence of SEQ ID NO: 1630; d. CDR-L1 comprising the amino acid sequence of SEQ ID NO: 817; e. CDR-L2 comprising the amino acid sequence of SEQ ID NO: 1359; and CDR-L3 comprising the amino acid sequence of SEQ ID NO: 1901. In one aspect, the present disclosure provides an antibody or antigen-binding fragment thereof comprising a. CDR-H1 comprising the amino acid sequence of SEQ ID NO: 546; b. CDR-H2 comprising the amino acid sequence of SEQ ID NO: 1088; c. CDR-H3 comprising the amino acid sequence of SEQ ID NO: 1630; d. CDR-L1 comprising the amino acid sequence of SEQ ID NO: 817; e. CDR-L2 comprising the amino acid sequence of SEQ ID NO: 1359; and f. CDR-L3 comprising the amino acid sequence of SEQ ID NO: 1901.

[0852] In one aspect, the present disclosure provides an antibody or antigen-binding fragment thereof comprising at least one, at least two, or all three VH CDR sequences selected from: a. CDR-H1 comprising the amino acid sequence of SEQ ID NO: 546; b. CDR-H2 comprising the amino acid sequence of SEQ ID NO: 1088, c. CDR-H3 comprising the amino acid sequence of SEQ ID NO: 1630; and a VL comprising the amino acid sequence of SEQ ID NO: 275.

[0853] In one aspect, the present disclosure provides an antibody or antigen-binding fragment thereof comprising at least one, at least two, or all three VL CDR sequences selected from: a. CDR-L1 comprising the amino acid sequence of SEQ ID NO: 817; b. CDR-L2 comprising the amino acid sequence of SEQ ID NO: 1359; c. CDR-L3 comprising the amino acid sequence of SEQ ID NO: 1901; and a VH comprising the amino acid sequence of SEQ ID NO: 4.

[0854] In one aspect, an antibody or antigen-binding fragment thereof is provided, wherein the antibody or antigen-binding fragment thereof comprises a heavy chain variable domain (VH) having at least 90%, 91%, 92%, 93%, 94%, 95%, 96%, 97%, 98%, 99%, or 100% sequence identity to the amino acid sequence SEQ ID NO: 4. In some embodiments, a VH sequence having at least 90%, 91%, 92%, 93%, 94%, 95%, 96%, 97%, 98%, or 99% identity contains substitutions (e.g., conservative substitutions), insertions, or deletions relative to the reference sequence, but an antibody or antigen-binding fragment thereof comprising that sequence retains the ability to bind to same antigen as of the parent (e.g., cancer associated antigen). In some embodiments, a total of 1 to 10 amino acids have been substituted, inserted and/or deleted in the amino acid sequence SEQ ID NO: 4. In some embodiments, substitutions, insertions, or deletions occur in regions outside the CDRs (e.g., in the FRs). Optionally, the antibody or antigen-binding fragment thereof comprises the VH sequence SEQ ID NO: 4, including one or more post-translational modifications of that sequence. In a particular embodiment, the VH comprises one, two or three CDRs selected from: a CDR-H1, comprising the amino acid sequence SEQ ID NO: 546; b CDR-H2, comprising the amino acid sequence SEQ ID NO: 1088; and c. CDR-H3, comprising the amino acid sequence SEQ ID NO: 1630.

[0855] In one aspect, an antibody or antigen-binding fragment thereof is provided, wherein the antibody or antigen-binding fragment thereof comprises a light chain variable domain (VL) having at least 90%, 91%, 92%, 93%, 94%, 95%, 96%, 97%, 98%, 99%, or 100% sequence identity to the amino acid sequence SEQ ID NO: 275. In some embodiments, a VL sequence having at least 90%, 91%, 92%, 93%, 94%, 95%, 96%, 97%, 98%, or 99% identity contains substitutions (e.g., conservative substitutions), insertions, or deletions relative to the reference sequence, but an antibody or antigen-binding fragment thereof comprising that sequence retains the ability to bind to same antigen as the parent (e.g., cancer associated antigen). In some embodiments, a total of 1 to 10 amino acids have been substituted, inserted and/or deleted in the amino acid sequence SEQ ID NO: 275. In some embodiments, the substitutions, insertions, or deletions occur in regions outside the CDRs (e.g., in the FRs). Optionally, the antibody or antigen-binding fragment thereof comprises the VL sequence SEQ ID NO: 275, including one or more post-translational modifications of that sequence. In a particular embodiment, the VL comprises one, two or three CDRs selected from: a. CDR-L1, comprising the amino acid sequence SEQ ID NO: 817; b. CDR-L2, comprising the amino acid sequence SEQ ID NO: 1359; and c. CDR-L3, comprising the amino acid sequence SEQ ID NO: 1901.

[0856] In one aspect, an antibody or antigen-binding fragment thereof is provided, wherein the antibody or antigen-binding fragment thereof comprises a VH as in any of the embodiments provided above, and a VL as in any of the embodiments provided above. In some embodiments, the antibody or antigen-binding fragment thereof comprises the VH amino acid sequence of SEQ ID NO: 4, and the VL amino acid sequence of SEQ ID NO: 275, optionally including post-translational modifications of those sequences.

### TBLA1005

[0857] In one aspect, the present disclosure provides an antibody or antigen-binding fragment thereof comprising at least one or both variable regions selected from: a. VH comprising the amino acid sequence of SEQ ID NO: 5 and b. VL comprising the amino acid sequence of SEQ ID NO: 276.

[0858] In one aspect, the present disclosure provides an antibody or antigen-binding fragment thereof comprising at least one, two, three, four, five, or six CDRs selected from: a. CDR-H1 comprising the amino acid sequence of SEQ ID NO: 547; b. CDR-H2 comprising the amino acid sequence of SEQ ID NO: 1089; c. CDR-H3 comprising the amino acid sequence of SEQ ID NO: 1631; d. CDR-L1 comprising the amino acid sequence of SEQ ID NO: 818; e. CDR-L2 comprising the amino acid sequence of SEQ ID NO: 1360; and f. CDR-L3 comprising the amino acid sequence of SEQ ID NO: 1902.

[0859] In one aspect, the present disclosure provides an antibody or antigen-binding fragment thereof comprising a. CDR-H1 comprising the amino acid sequence of SEQ ID NO: 547; b. CDR-H2 comprising the amino acid sequence of SEQ ID NO: 1089; c. CDR-H3 comprising the amino acid sequence of SEQ ID NO: 1631; d. CDR-L1 comprising the amino acid sequence of SEQ ID NO: 818; e. CDR-L2 comprising the amino acid sequence of SEQ ID NO: 1360; and f. CDR-L3 comprising the amino acid sequence of SEQ ID NO: 1902. In one aspect, the present disclosure provides an antibody or antigen-binding fragment thereof comprising CDR-H3 comprising the amino acid sequence of SEQ ID NO: 1631; and CDR-L3 comprising the amino acid sequence of SEQ ID NO: 1902.

[0860] In one aspect, the present disclosure provides an antibody or antigen-binding fragment thereof comprising at least one, at least two, or all three VH CDR sequences selected from: a. CDR-H1 comprising the amino acid sequence of SEQ ID NO: 547; b. CDR-H2 comprising the amino acid sequence of SEQ ID NO: 1089; c. CDR-H3 comprising the amino acid sequence of SEQ ID NO: 1631; and a VL comprising the amino acid sequence of SEQ ID NO: 276.

[0861] In one aspect, the present disclosure provides an antibody or antigen-binding fragment thereof comprising at least one, at least two, or all three VL CDR sequences selected from: a. CDR-L1 comprising the amino acid sequence of SEQ ID NO: 818; b. CDR-L2 comprising the amino acid sequence of SEQ ID NO: 1360; c. CDR-L3 comprising the amino acid sequence of SEQ ID NO: 1902; and a VH comprising the amino acid sequence of SEQ ID NO: 5.

[0862] In one aspect, an antibody or antigen-binding fragment thereof is provided, wherein the antibody or antigen-binding fragment thereof comprises a heavy chain variable domain (VH) having at least 90%, 91%, 92%, 93%, 94%, 95%, 96%, 97%, 98%, 99%, or 100% sequence identity to the amino acid sequence SEQ ID NO: 5. In some embodiments, a VH sequence having at least 90%, 91%, 92%, 93%, 94%, 95%, 96%, 97%, 98%, or 99% identity contains substitutions (e.g., conservative substitutions), insertions, or deletions relative to the reference sequence, but an antibody or antigen-binding fragment thereof comprising that sequence retains the ability to bind to same antigen as of the parent (e.g., cancer associated antigen). In some embodiments, a total of 1 to 10 amino acids have been substituted, inserted and/or deleted in the amino acid sequence SEQ ID NO: 5. In some embodiments, substitutions, insertions, or deletions occur in regions outside the CDRs (e.g., in the FRs). Optionally, the antibody or antigen-binding fragment thereof comprises the VH sequence SEQ ID NO: 5, including one or more post-translational modifications of that sequence. In a particular embodiment, the VH comprises one, two or three CDRs selected from: a. CDR-H1, comprising the amino acid sequence SEQ ID NO: 547; b. CDR-H2, comprising the amino acid sequence SEQ ID NO: 1089; and c. CDR-H3, comprising the amino acid sequence SEQ ID NO: 1631.

[0863] In one aspect, an antibody or antigen-binding fragment thereof is provided, wherein the antibody or antigen-binding fragment thereof comprises a light chain variable domain (VL) having at least 90%, 91%, 92%, 93%, 94%, 95%, 96%, 97%, 98%, 99%, or 100% sequence identity to the amino acid sequence SEQ ID NO: 276. In some embodiments, a VL sequence having at least 90%, 91%, 92%, 93%, 94%, 95%, 96%, 97%, 98%, or 99% identity contains substitutions (e.g., conservative substitutions), insertions, or deletions relative to the reference sequence, but an antibody or antigen-binding fragment thereof comprising that sequence retains the ability to bind to same antigen as the parent (e.g., cancer associated antigen). In some embodiments, a total of 1 to 10 amino acids have been substituted, inserted and/or deleted in the amino acid sequence SEQ ID NO: 276. In some embodiments, the substitutions, insertions, or deletions occur in regions outside the CDRs (e.g., in the FRs). Optionally, the antibody or antigen-binding fragment thereof comprises the VL sequence SEQ ID NO: 276, including one or more post-translational modifications of that sequence. In a particular embodiment, the VL comprises one, two or three CDRs selected from: a. CDR-L1, comprising the amino acid sequence SEQ ID NO: 818; b. CDR-L2, comprising the amino acid sequence SEQ ID NO: 1360; and c. CDR-L3, comprising the amino acid sequence SEQ ID NO: 1902.

[0864] In one aspect, an antibody or antigen-binding fragment thereof is provided, wherein the antibody or antigen-binding fragment thereof comprises a VH as in any of the embodiments provided above, and a VL as in any of the embodiments provided above. In some embodiments, the antibody or antigen-binding fragment thereof comprises the VH amino acid sequence of SEQ ID NO: 5, and the VL amino acid sequence of SEQ ID NO: 276, optionally including post-translational modifications of those sequences.

### TBLA1006

[0865] In one aspect, the present disclosure provides an antibody or antigen-binding fragment thereof comprising at least one or both variable regions selected from: a. VH comprising the amino acid sequence of SEQ ID NO: 6 and b. VL comprising the amino acid sequence of SEQ ID NO: 277.

[0866] In one aspect, the present disclosure provides an antibody or antigen-binding fragment thereof comprising at least one, two, three, four, five, or six CDRs selected from: a. CDR-H1 comprising the amino acid sequence of SEQ ID NO: 548; b. CDR-H2 comprising the amino acid sequence of SEQ ID NO: 1090; c. CDR-H3 comprising the amino acid sequence of SEQ ID NO: 1632; d. CDR-L1 comprising the amino acid sequence of SEQ ID NO: 819; e. CDR-L2 comprising the amino acid sequence of SEQ ID NO: 1361; and f. CDR-L3 comprising the amino acid sequence of SEQ ID NO: 1903.

[0867] In one aspect, the present disclosure provides an antibody or antigen-binding fragment thereof comprising: a. CDR-H1 comprising the amino acid sequence of SEQ ID NO: 548; b. CDR-H2 comprising the amino acid sequence of SEQ ID NO: 1090; c. CDR-H3 comprising the amino acid sequence of SEQ ID NO: 1632; d. CDR-L1 comprising the amino acid sequence of SEQ ID NO: 819; e. CDR-L2 comprising the amino acid sequence of SEQ ID NO: 1361; and f. CDR-L3 comprising the amino acid sequence of SEQ ID NO: 1903. In one aspect, the present disclosure provides an antibody or antigen-binding fragment thereof comprising CDR-H3 comprising the amino acid sequence of SEQ ID NO: 1632; and CDR-L3 comprising the amino acid sequence of SEQ ID NO: 1903.

[0868] In one aspect, the present disclosure provides an antibody or antigen-binding fragment thereof comprising at least one, at least two, or all three VH CDR sequences selected from: a. CDR-H1 comprising the amino acid sequence of SEQ ID NO: 548; b. CDR-H2 comprising the amino acid sequence of SEQ ID NO: 1090; c. CDR-H3 comprising the amino acid sequence of SEQ ID NO: 1632; and a VL comprising the amino acid sequence of SEQ ID NO: 277.

[0869] In one aspect, the present disclosure provides an antibody or antigen-binding fragment thereof comprising at least one, at least two, or all three VL CDR sequences selected from: a. CDR-L1 comprising the amino acid sequence of SEQ ID NO: 819; b. CDR-L2 comprising the amino acid sequence of SEQ ID NO: 1361; c. CDR-L3 comprising the amino acid sequence of SEQ ID NO: 1903; and a VH comprising the amino acid sequence of SEQ ID NO: 6.

[0870] In one aspect, an antibody or antigen-binding fragment thereof is provided, wherein the antibody or antigen-binding fragment thereof comprises a heavy chain variable domain (VH) having at least 90%, 91%, 92%, 93%, 94%, 95%, 96%, 97%, 98%, 99%, or 100% sequence identity to the amino acid sequence SEQ ID NO: 6. In some embodiments, a VH sequence having at least 90%, 91%, 92%, 93%, 94%, 95%, 96%, 97%, 98%, or 99% identity contains substitutions (e.g., conservative substitutions), insertions, or deletions relative to the reference sequence, but an antibody or antigen-binding fragment thereof comprising that sequence retains the ability to bind to same antigen as of the parent (e.g., cancer associated antigen). In some embodiments, a total of 1 to 10 amino acids have been substituted, inserted and/or deleted in the amino acid sequence SEQ ID NO: 6. In some embodiments, substitutions, insertions, or deletions occur in regions outside the CDRs (e.g., in the FRs). Optionally, the antibody or antigen-binding fragment thereof comprises the VH sequence SEQ ID NO: 6, including one or more post-translational modifications of that sequence. In a particular embodiment, the VH comprises one, two or three CDRs selected from: a. CDR-H1, comprising the amino acid sequence SEQ ID NO: 548; b. CDR-H2, comprising the amino acid sequence SEQ ID NO: 1090; and c. CDR-H3, comprising the amino acid sequence SEQ ID NO: 1632.

[0871] In one aspect, an antibody or antigen-binding fragment thereof is provided, wherein the antibody or antigen-binding fragment thereof comprises a light chain variable domain (VL) having at least 90%, 91%, 92%, 93%, 94%, 95%, 96%, 97%, 98%, 99%, or 100% sequence identity to the amino acid sequence SEQ ID NO: 277. In some embodiments, a VL sequence having at least 90%, 91%, 92%, 93%, 94%, 95%, 96%, 97%, 98%, or 99% identity contains substitutions (e.g., conservative substitutions), insertions, or deletions relative to the reference sequence, but an antibody or antigen-binding fragment thereof comprising that sequence retains the ability to bind to same antigen as the parent (e.g., cancer associated antigen). In some embodiments, a total of 1 to 10 amino acids have been substituted, inserted and/or deleted in the amino acid sequence SEQ ID NO: 277. In some embodiments, the substitutions, antigen-binding fragment thereof comprises the VL sequence SEQ ID NO: 277, including one or more post-translational modifications of that sequence. In a particular embodiment, the VL comprises one, two or three CDRs selected from: a. CDR-L1, comprising the amino acid sequence SEQ ID NO: 819; b. CDR-L2, comprising the amino acid sequence SEQ ID NO: 1361; and c. CDR-L3, comprising the amino acid sequence SEQ ID NO: 1903.

[0872] In one aspect, an antibody or antigen-binding fragment thereof is provided, wherein the antibody or antigen-binding fragment thereof comprises a VH as in any of the embodiments provided above, and a VL as in any of the embodiments provided above. In some embodiments, the antibody or antigen-binding fragment thereof comprises the VH amino acid sequence of SEQ ID NO: 6, and the VL amino acid sequence of SEQ ID NO: 277, optionally including post-translational modifications of those sequences.

### TBLA1007

[0873] In one aspect, the present disclosure provides an antibody or antigen-binding fragment thereof comprising at least one or both variable regions selected from: a. VH comprising the amino acid sequence of SEQ ID NO: 7 and b. VL comprising the amino acid sequence of SEQ ID NO: 278.

[0874] In one aspect, the present disclosure provides an antibody or antigen-binding fragment thereof comprising at least one, two, three, four, five, or six CDRs selected from: a. CDR-H1 comprising the amino acid sequence of SEQ ID NO: 549; b. CDR-H2 comprising the amino acid sequence of SEQ ID NO: 1091; c. CDR-H3 comprising the amino acid sequence of SEQ ID NO: 1633; d. CDR-L1 comprising the amino acid sequence of SEQ ID NO: 820; e. CDR-L2 comprising the amino acid sequence of SEQ ID NO: 1362; and f. CDR-L3 comprising the amino acid sequence of SEQ ID NO: 1904.

[0875] In one aspect, the present disclosure provides an antibody or antigen-binding fragment thereof comprising: a. CDR-H1 comprising the amino acid sequence of SEQ ID NO: 549; b. CDR-H2 comprising the amino acid sequence of SEQ ID NO: 1091; c. CDR-H3 comprising the amino acid sequence of SEQ ID NO: 1633; d. CDR-L1 comprising the amino acid sequence of SEQ ID NO: 820; e. CDR-L2 comprising the amino acid sequence of SEQ ID NO: 1362; and f. CDR-L3 comprising the amino acid sequence of SEQ ID NO: 1904. In one aspect, the present disclosure provides an antibody or antigen-binding fragment thereof comprising CDR-H3 comprising the amino acid sequence of SEQ ID NO: 1633; and CDR-L3 comprising the amino acid sequence of SEQ ID NO: 1904.

[0876] In one aspect, the present disclosure provides an antibody or antigen-binding fragment thereof comprising at least one, at least two, or all three VH CDR sequences selected from: a. CDR-H1 comprising the amino acid sequence of SEQ ID NO: 549; b. CDR-H2 comprising the amino acid sequence of SEQ ID NO: 1091; c. CDR-H3 comprising the amino acid sequence of SEQ ID NO: 1633; and a VL comprising the amino acid sequence of SEQ ID NO: 278.

[0877] In one aspect, the present disclosure provides an antibody or antigen-binding fragment thereof comprising at least one, at least two, or all three VL CDR sequences selected from: a. CDR-L1 comprising the amino acid sequence of SEQ ID NO: 820; b. CDR-L2 comprising the amino acid sequence of SEQ ID NO: 1362; c. CDR-L3 comprising the amino acid sequence of SEQ ID NO: 1904; and a VH comprising the amino acid sequence of SEQ ID NO: 7.

[0878] In one aspect, an antibody or antigen-binding fragment thereof is provided, wherein the antibody or antigen-binding fragment thereof comprises a heavy chain variable domain (VH) having at least 90%, 91%, 92%, 93%, 94%, 95%, 96%, 97%, 98%, 99%, or 100% sequence identity to the amino acid sequence SEQ ID NO: 7. In some embodiments, a VH sequence having at least 90%, 91%, 92%, 93%, 94%, 95%, 96%, 97%, 98%, or 99% identity contains substitutions (e.g., conservative substitutions), insertions, or deletions relative to the reference sequence, but an antibody or antigen-binding fragment thereof comprising that sequence retains the ability to bind to same antigen as of the parent (e.g., cancer associated antigen). In some embodiments, a total of 1 to 10 amino acids have been substituted, inserted and/or deleted in the amino acid sequence SEQ ID NO: 7. In some embodiments, substitutions, insertions, or deletions occur in regions outside the CDRs (e.g., in the FRs). Optionally, the antibody or antigen-binding fragment thereof comprises the VH sequence SEQ ID NO: 7, including one or more post-translational modifications of that sequence. In a particular embodiment, the VH comprises one, two or three CDRs selected from: a. CDR-H1, comprising the amino acid sequence SEQ ID NO: 549; b. CDR-H2, comprising the amino acid sequence SEQ ID NO: 1091; and c. CDR-H3, comprising the amino acid sequence SEQ ID NO: 1633.

[0879] In one aspect, an antibody or antigen-binding fragment thereof is provided, wherein the antibody or antigen-binding fragment thereof comprises a light chain variable domain (VL) having at least 90%, 91%, 92%, 93%, 94%, 95%, 96%, 97%, 98%, 99%, or 100% sequence identity to the amino acid sequence SEQ ID NO: 278. In some embodiments, a VL sequence having at least 90%, 91%, 92%, 93%, 94%, 95%, 96%, 97%, 98%, or 99% identity contains substitutions (e.g., conservative substitutions), insertions, or deletions relative to the reference sequence, but an antibody or antigen-binding fragment thereof comprising that sequence retains the ability to bind to same antigen as the parent (e.g., cancer associated antigen). In some embodiments, a total of 1 to 10 amino acids have been substituted, inserted and/or deleted in the amino acid sequence SEQ ID NO: 278. In some embodiments, the substitutions, insertions, or deletions occur in regions outside the CDRs (e.g., in the FRs). Optionally, the antibody or antigen-binding fragment thereof comprises the VL sequence SEQ ID NO: 278, including one or more post-translational modifications of that sequence. In a particular embodiment, the VL comprises one, two or three CDRs selected from: a. CDR-L1, comprising the amino acid sequence SEQ ID NO: 820; b. CDR-L2, comprising the amino acid sequence SEQ ID NO: 1362; and c. CDR-L3, comprising the amino acid sequence SEQ ID NO: 1904.

[0880] In one aspect, an antibody or antigen-binding fragment thereof is provided, wherein the antibody or antigen-binding fragment thereof comprises a VH as in any of the embodiments provided above, and a VL as in any of the embodiments provided above. In some embodiments, the antibody or antigen-binding fragment thereof comprises the VH amino acid sequence of SEQ ID NO: 7, and the VL amino acid sequence of SEQ ID NO: 278, optionally including post-translational modifications of those sequences.

### TBLA1008

[0881] In one aspect, the present disclosure provides an antibody or antigen-binding fragment thereof comprising at least one or both variable regions selected from: a. VH comprising the amino acid sequence of SEQ ID NO: 8 and b. VL comprising the amino acid sequence of SEQ ID NO: 279.

[0882] In one aspect, the present disclosure provides an antibody or antigen-binding fragment thereof comprising at least one, two, three, four, five, or six CDRs selected from: a. CDR-H1 comprising the amino acid sequence of SEQ ID NO: 550; b. CDR-H2 comprising the amino acid sequence of SEQ ID NO: 1092; c. CDR-H3 comprising the amino acid sequence of SEQ ID NO: 1634; d. CDR-L1 comprising the amino acid sequence of SEQ ID NO: 821; e. CDR-L2 comprising the amino acid sequence of SEQ ID NO: 1363; and f. CDR-L3 comprising the amino acid sequence of SEQ ID NO: 1905.

[0883] In one aspect, the present disclosure provides an antibody or antigen-binding fragment thereof comprising: a. CDR-H1 comprising the amino acid sequence of SEQ ID NO: 550; b. CDR-H2 comprising the amino acid sequence of SEQ ID NO: 1092; c. CDR-H3 comprising the amino acid sequence of SEQ ID NO: 1634; d. CDR-L1 comprising the amino acid sequence of SEQ ID NO: 821; e. CDR-L2 comprising the amino acid sequence of SEQ ID NO: 1363; and f. CDR-L3 comprising the amino acid sequence of SEQ ID NO: 1905. In one aspect, the present disclosure provides an antibody or antigen-binding fragment thereof comprising a CDR-H3 comprising the amino acid sequence of SEQ ID NO: 1634; and CDR-L3 comprising the amino acid sequence of SEQ ID NO: 1905.

[0884] In one aspect, the present disclosure provides an antibody or antigen-binding fragment thereof comprising at least one, at least two, or all three VH CDR sequences selected from: a. CDR-H1 comprising the amino acid sequence of SEQ ID NO: 550; b. CDR-H2 comprising the amino acid sequence of SEQ ID NO: 1092; c. CDR-H3 comprising the amino acid sequence of SEQ ID NO: 1634; and a VL comprising the amino acid sequence of SEQ ID NO: 279.

[0885] In one aspect, the present disclosure provides an antibody or antigen-binding fragment thereof comprising at least one, at least two, or all three VL CDR sequences selected from: a. CDR-L1 comprising the amino acid sequence of SEQ ID NO: 821; b. CDR-L2 comprising the amino acid sequence of SEQ ID NO: 1363; c. CDR-L3 comprising the amino acid sequence of SEQ ID NO: 1905; and a VH comprising the amino acid sequence of SEQ ID NO: 8.

[0886] In one aspect, an antibody or antigen-binding fragment thereof is provided, wherein the antibody or antigen-binding fragment thereof comprises a heavy chain variable domain (VH) having at least 90%, 91%, 92%, 93%, 94%, 95%, 96%, 97%, 98%, 99%, or 100% sequence identity to the amino acid sequence SEQ ID NO: 8. In some embodiments, a VH sequence having at least 90%, 91%, 92%, 93%, 94%, 95%, 96%, 97%, 98%, or 99% identity contains substitutions (e.g., conservative substitutions), insertions, or deletions relative to the reference sequence, but an antibody or antigen-binding fragment thereof comprising that sequence retains the ability to bind to same antigen as of the parent (e.g., cancer associated antigen). In some embodiments, a total of 1 to 10 amino acids have been substituted, inserted and/or deleted in the amino acid sequence SEQ ID NO: 8. In some embodiments, substitutions, antigen-binding fragment thereof comprises the VH sequence SEQ ID NO: 8, including one or more post-translational modifications of that sequence. In a particular embodiment, the VH comprises one, two or three CDRs selected from: a. CDR-H1, comprising the amino acid sequence SEQ ID NO: 550; b. CDR-H2, comprising the amino acid sequence SEQ ID NO: 1092; and c. CDR-H3, comprising the amino acid sequence SEQ ID NO: 1634.

[0887] In one aspect, an antibody or antigen-binding fragment thereof is provided, wherein the antibody or antigen-binding fragment thereof comprises a light chain variable domain (VL) having at least 90%, 91%, 92%, 93%, 94%, 95%, 96%, 97%, 98%, 99%, or 100% sequence identity to the amino acid sequence SEQ ID NO: 279. In some embodiments, a VL sequence having at least 90%, 91%, 92%, 93%, 94%, 95%, 96%, 97%, 98%, or 99% identity contains substitutions (e.g., conservative substitutions), insertions, or deletions relative to the reference sequence, but an antibody or antigen-binding fragment thereof comprising that sequence retains the ability to bind to same antigen as the parent (e.g., cancer associated antigen). In some embodiments, a total of 1 to 10 amino acids have been substituted, inserted and/or deleted in the amino acid sequence SEQ ID NO: 279. In some embodiments, the substitutions, insertions, or deletions occur in regions outside the CDRs (e.g., in the FRs). Optionally, the antibody or antigen-binding fragment thereof comprises the VL sequence SEQ ID NO: 279, including one or more post-translational modifications of that sequence. In a particular embodiment, the VL comprises one, two or three CDRs selected from: a. CDR-L1, comprising the amino acid sequence SEQ ID NO: 821; b. CDR-L2, comprising the amino acid sequence SEQ ID NO: 1363; and c. CDR-L3, comprising the amino acid sequence SEQ ID NO: 1905.

[0888] In one aspect, an antibody or antigen-binding fragment thereof is provided, wherein the antibody or antigen-binding fragment thereof comprises a VH as in any of the embodiments provided above, and a VL as in any of the embodiments provided above. In some embodiments, the antibody or antigen-binding fragment thereof comprises the VH amino acid sequence of SEQ ID NO: 8, and the VL amino acid sequence of SEQ ID NO: 279, optionally including post-translational modifications of those sequences.

### TBLA1009

[0889] In one aspect, the present disclosure provides an antibody or antigen-binding fragment thereof comprising at least one or both variable regions selected from: a. VH comprising the amino acid sequence of SEQ ID NO: 9 and b. VL comprising the amino acid sequence of SEQ ID NO: 280.

[0890] In one aspect, the present disclosure provides an antibody or antigen-binding fragment thereof comprising at least one, two, three, four, five, or six CDRs selected from: a. CDR-H1 comprising the amino acid sequence of SEQ ID NO: 551; b. CDR-H2 comprising the amino acid sequence of SEQ ID NO: 1093; c. CDR-H3 comprising the amino acid sequence of SEQ ID NO: 1635; d. CDR-L1 comprising the amino acid sequence of SEQ ID NO: 822; e. CDR-L2 comprising the amino acid sequence of SEQ ID NO: 1364; and f. CDR-L3 comprising the amino acid sequence of SEQ ID NO: 1906.

[0891] In one aspect, the present disclosure provides an antibody or antigen-binding fragment thereof comprising: a. CDR-H1 comprising the amino acid sequence of SEQ ID NO: 551; b. CDR-H2 comprising the amino acid sequence of SEQ ID NO: 1093; c. CDR-H3 comprising the amino acid sequence of SEQ ID NO: 1635; d. CDR-L1 comprising the amino acid sequence of SEQ ID NO: 822; e. CDR-L2 comprising the amino acid sequence of SEQ ID NO: 1364; and f. CDR-L3 comprising the amino acid sequence of SEQ ID NO: 1906. In one aspect, the present disclosure provides an antibody or antigen-binding fragment thereof comprising a CDR-H3 comprising the amino acid sequence of SEQ ID NO: 1635; and a CDR-L3 comprising the amino acid sequence of SEQ ID NO: 1906.

[0892] In one aspect, the present disclosure provides an antibody or antigen-binding fragment thereof comprising at least one, at least two, or all three VH CDR sequences selected from: a. CDR-H1 comprising the amino acid sequence of SEQ ID NO: 551; b. CDR-H2 comprising the amino acid sequence of SEQ ID NO: 1093; c. CDR-H3 comprising the amino acid sequence of SEQ ID NO: 1635; and a VL comprising the amino acid sequence of SEQ ID NO: 280.

[0893] In one aspect, the present disclosure provides an antibody or antigen-binding fragment thereof comprising at least one, at least two, or all three VL CDR sequences selected from: a. CDR-L1 comprising the amino acid sequence of SEQ ID NO: 822; b. CDR-L2 comprising the amino acid sequence of SEQ ID NO: 1364; c. CDR-L3 comprising the amino acid sequence of SEQ ID NO: 1906; and a VH comprising the amino acid sequence of SEQ ID NO: 9.

[0894] In one aspect, an antibody or antigen-binding fragment thereof is provided, wherein the antibody or antigen-binding fragment thereof comprises a heavy chain variable domain (VH) having at least 90%, 91%, 92%, 93%, 94%, 95%, 96%, 97%, 98%, 99%, or 100% sequence identity to the amino acid sequence SEQ ID NO: 9. In some embodiments, a VH sequence having at least 90%, 91%, 92%, 93%, 94%, 95%, 96%, 97%, 98%, or 99% identity contains substitutions (e.g., conservative substitutions), insertions, or deletions relative to the reference sequence, but an antibody or antigen-binding fragment thereof comprising that sequence retains the ability to bind to same antigen as of the parent (e.g., cancer associated antigen). In some embodiments, a total of 1 to 10 amino acids have been substituted, inserted and/or deleted in the amino acid sequence SEQ ID NO: 9. In some embodiments, substitutions, insertions, or deletions occur in regions outside the CDRs (e.g., in the FRs). Optionally, the antibody or antigen-binding fragment thereof comprises the VH sequence SEQ ID NO: 9, including one or more post-translational modifications of that sequence. In a particular embodiment, the VH comprises one, two or three CDRs selected from: a. CDR-H1, comprising the amino acid sequence SEQ ID NO: 551; b. CDR-H2, comprising the amino acid sequence SEQ ID NO: 1093; and c. CDR-H3, comprising the amino acid sequence SEQ ID NO: 1635.

[0895] In one aspect, an antibody or antigen-binding fragment thereof is provided, wherein the antibody or antigen-binding fragment thereof comprises a light chain variable domain (VL) having at least 90%, 91%, 92%, 93%, 94%, 95%, 96%, 97%, 98%, 99%, or 100% sequence identity to the amino acid sequence SEQ ID NO: 280. In some embodiments, a VL sequence having at least 90%, 91%, 92%, 93%, 94%, 95%, 96%, 97%, 98%, or 99% identity contains substitutions (e.g., conservative substitutions), insertions, or deletions relative to the reference sequence, but an antibody or antigen-binding fragment thereof comprising that sequence retains the ability to bind to same antigen as the parent (e.g., cancer associated antigen). In some embodiments, a total of 1 to 10 amino acids have been substituted, inserted and/or deleted in the amino acid sequence SEQ ID NO: 280. In some embodiments, the substitutions, insertions, or deletions occur in regions outside the CDRs (e.g., in the FRs). Optionally, the antibody or antigen-binding fragment thereof comprises the VL sequence SEQ ID NO: 280, including one or more post-translational modifications of that sequence. In a particular embodiment, the VL comprises one, two or three CDRs selected from: a. CDR-L1, comprising the amino acid sequence SEQ ID NO: 822; b. CDR-L2, comprising the amino acid sequence SEQ ID NO: 1364; and c. CDR-L3, comprising the amino acid sequence SEQ ID NO: 1906.

[0896] In one aspect, an antibody or antigen-binding fragment thereof is provided, wherein the antibody or antigen-binding fragment thereof comprises a VH as in any of the embodiments provided above, and a VL as in any of the embodiments provided above. In some embodiments, the antibody or antigen-binding fragment thereof comprises the VH amino acid sequence of SEQ ID NO: 9, and the VL amino acid sequence of SEQ ID NO: 280, optionally including post-translational modifications of those sequences.

### TBLA1010

[0897] In one aspect, the present disclosure provides an antibody or antigen-binding fragment thereof comprising at least one or both variable regions selected from: a. VH comprising the amino acid sequence of SEQ ID NO: 10 and b. VL comprising the amino acid sequence of SEQ ID NO: 281.

[0898] In one aspect, the present disclosure provides an antibody or antigen-binding fragment thereof comprising at least one, two, three, four, five, or six CDRs selected from: a. CDR-H1 comprising the amino acid sequence of SEQ ID NO: 552; b. CDR-H2 comprising the amino acid sequence of SEQ ID NO: 1094; c. CDR-H3 comprising the amino acid sequence of SEQ ID NO: 1636; d. CDR-L1 comprising the amino acid sequence of SEQ ID NO: 823; e. CDR-L2 comprising the amino acid sequence of SEQ ID NO: 1365; and f. CDR-L3 comprising the amino acid sequence of SEQ ID NO: 1907.

[0899] In one aspect, the present disclosure provides an antibody or antigen-binding fragment thereof comprising: a. CDR-H1 comprising the amino acid sequence of SEQ ID NO: 552; b. CDR-H2 comprising the amino acid sequence of SEQ ID NO: 1094; c. CDR-H3 comprising the amino acid sequence of SEQ ID NO: 1636; d. CDR-L1 comprising the amino acid sequence of SEQ ID NO: 823; e. CDR-L2 comprising the amino acid sequence of SEQ ID NO: 1365; and f. CDR-L3 comprising the amino acid sequence of SEQ ID NO: 1907. In one aspect, the present disclosure provides an antibody or antigen-binding fragment thereof comprising a CDR-H3 comprising the amino acid sequence of SEQ ID NO: 1636; and a CDR-L3 comprising the amino acid sequence of SEQ ID NO: 1907.

[0900] In one aspect, the present disclosure provides an antibody or antigen-binding fragment thereof comprising at least one, at least two, or all three VH CDR sequences selected from: a. CDR-H1 comprising the amino acid sequence of SEQ ID NO: 552; b. CDR-H2 comprising the amino acid sequence of SEQ ID NO: 1094; c. CDR-H3 comprising the amino acid sequence of SEQ ID NO: 1636; and a VL comprising the amino acid sequence of SEQ ID NO: 281.

[0901] In one aspect, the present disclosure provides an antibody or antigen-binding fragment thereof comprising at least one, at least two, or all three VL CDR sequences selected from: a. CDR-L1 comprising the amino acid sequence of SEQ ID NO: 823; b. CDR-L2 comprising the amino acid sequence of SEQ ID NO: 1365; c. CDR-L3 comprising the amino acid sequence of SEQ ID NO: 1907; and a VH comprising the amino acid sequence of SEQ ID NO: 10.

[0902] In one aspect, an antibody or antigen-binding fragment thereof is provided, wherein the antibody or antigen-binding fragment thereof comprises a heavy chain variable domain (VH) having at least 90%, 91%, 92%, 93%, 94%, 95%, 96%, 97%, 98%, 99%, or 100% sequence identity to the amino acid sequence SEQ ID NO: 10. In some embodiments, a VH sequence having at least 90%, 91%, 92%, 93%, 94%, 95%, 96%, 97%, 98%, or 99% identity contains substitutions (e.g., conservative substitutions), insertions, or deletions relative to the reference sequence, but an antibody or antigen-binding fragment thereof comprising that sequence retains the ability to bind to same antigen as of the parent (e.g., cancer associated antigen). In some embodiments, a total of 1 to 10 amino acids have been substituted, inserted and/or deleted in the amino acid sequence SEQ ID NO: 10. In some embodiments, substitutions, insertions, or deletions occur in regions outside the CDRs (e.g., in the FRs). Optionally, the antibody or antigen-binding fragment thereof comprises the VH sequence SEQ ID NO: 10, including one or more post-translational modifications of that sequence. In a particular embodiment, the VH comprises one, two or three CDRs selected from: a. CDR-H1, comprising the amino acid sequence SEQ ID NO: 552; b. CDR-H2, comprising the amino acid sequence SEQ ID NO: 1094; and a CDR-H3, comprising the amino acid sequence SEQ ID NO: 1636.

[0903] In one aspect, an antibody or antigen-binding fragment thereof is provided, wherein the antibody or antigen-binding fragment thereof comprises a light chain variable domain (VL) having at least 90%, 91%, 92%, 93%, 94%, 95%, 96%, 97%, 98%, 99%, or 100% sequence identity to the amino acid sequence SEQ ID NO: 281. In some embodiments, a VL sequence having at least 90%, 91%, 92%, 93%, 94%, 95%, 96%, 97%, 98%, or 99% identity contains substitutions (e.g., conservative substitutions), insertions, or deletions relative to the reference sequence, but an antibody or antigen-binding fragment thereof comprising that sequence retains the ability to bind to same antigen as the parent (e.g., cancer associated antigen). In some embodiments, a total of 1 to 10 amino acids have been substituted, inserted and/or deleted in the amino acid sequence SEQ ID NO: 281. In some embodiments, the substitutions, insertions, or deletions occur in regions outside the CDRs (e.g., in the FRs). Optionally, the antibody or antigen-binding fragment thereof comprises the VL sequence SEQ ID NO: 281, including one or more post-translational modifications of that sequence. In a particular embodiment, the VL comprises one, two or three CDRs selected from: a. CDR-L1, comprising the amino acid sequence SEQ ID NO: 823; b. CDR-L2, comprising the amino acid sequence SEQ ID NO: 1365; and c. CDR-L3, comprising the amino acid sequence SEQ ID NO: 1907.

[0904] In one aspect, an antibody or antigen-binding fragment thereof is provided, wherein the antibody or antigen-binding fragment thereof comprises a VH as in any of the embodiments provided above, and a VL as in any of the embodiments provided above. In some embodiments, the antibody or antigen-binding fragment thereof comprises the VH amino acid sequence of SEQ ID NO: 10, and the VL amino acid sequence of SEQ ID NO: 281, optionally including post-translational modifications of those sequences.

### TBLA1011

[0905] In one aspect, the present disclosure provides an antibody or antigen-binding fragment thereof comprising at least one or both variable regions selected from: a. VH comprising the amino acid sequence of SEQ ID NO: 11 and VL comprising the amino acid sequence of SEQ ID NO: 282.

[0906] In one aspect, the present disclosure provides an antibody or antigen-binding fragment thereof comprising at least one, two, three, four, five, or six CDRs selected from: a. CDR-H1 comprising the amino acid sequence of SEQ ID NO: 553; b. CDR-H2 comprising the amino acid sequence of SEQ ID NO: 1095; c. CDR-H3 comprising the amino acid sequence of SEQ ID NO: 1637; d. CDR-L1 comprising the amino acid sequence of SEQ ID NO: 824; e. CDR-L2 comprising the amino acid sequence of SEQ ID NO: 1366; and f. CDR-L3 comprising the amino acid sequence of SEQ ID NO: 1908.

[0907] In one aspect, the present disclosure provides an antibody or antigen-binding fragment thereof comprising: a. CDR-H1 comprising the amino acid sequence of SEQ ID NO: 553; b. CDR-H2 comprising the amino acid sequence of SEQ ID NO: 1095; c. CDR-H3 comprising the amino acid sequence of SEQ ID NO: 1637; d. CDR-L1 comprising the amino acid sequence of SEQ ID NO: 824; e. CDR-L2 comprising the amino acid sequence of SEQ ID NO: 1366; and f. CDR-L3 comprising the amino acid sequence of SEQ ID NO: 1908. In one aspect, the present disclosure provides an antibody or antigen-binding fragment thereof comprising a CDR-H3 comprising the amino acid sequence of SEQ ID NO: 1637; and a CDR-L3 comprising the amino acid sequence of SEQ ID NO: 1908.

[0908] In one aspect, the present disclosure provides an antibody or antigen-binding fragment thereof comprising at least one, at least two, or all three VH CDR sequences selected from: a. CDR-H1 comprising the amino acid sequence of SEQ ID NO: 553; b. CDR-H2 comprising the amino acid sequence of SEQ ID NO: 1095; c. CDR-H3 comprising the amino acid sequence of SEQ ID NO: 1637; and a VL comprising the amino acid sequence of SEQ ID NO: 282.

[0909] In one aspect, the present disclosure provides an antibody or antigen-binding fragment thereof comprising at least one, at least two, or all three VL CDR sequences selected from: a. CDR-L1 comprising the amino acid sequence of SEQ ID NO: 824; b. CDR-L2 comprising the amino acid sequence of SEQ ID NO: 1366; c. CDR-L3 comprising the amino acid sequence of SEQ ID NO: 1908; and a VH comprising the amino acid sequence of SEQ ID NO: 11.

[0910] In one aspect, an antibody or antigen-binding fragment thereof is provided, wherein the antibody or antigen-binding fragment thereof comprises a heavy chain variable domain (VH) having at least 90%, 91%, 92%, 93%, 94%, 95%, 96%, 97%, 98%, 99%, or 100% sequence identity to the amino acid sequence SEQ ID NO: 11. In some embodiments, a VH sequence having at least 90%, 91%, 92%, 93%, 94%, 95%, 96%, 97%, 98%, or 99% identity contains substitutions (e.g., conservative substitutions), insertions, or deletions relative to the reference sequence, but an antibody or antigen-binding fragment thereof comprising that sequence retains the ability to bind to same antigen as of the parent (e.g., cancer associated antigen). In some embodiments, a total of 1 to 10 amino acids have been substituted, inserted and/or deleted in the amino acid sequence SEQ ID NO: 11. In some embodiments, substitutions, insertions, or deletions occur in regions outside the CDRs (e.g., in the FRs). Optionally, the antibody or antigen-binding fragment thereof comprises the VH sequence SEQ ID NO: 11, including one or more post-translational modifications of that sequence. In a particular embodiment, the VH comprises one, two or three CDRs selected from: a. CDR-H1, comprising the amino acid sequence SEQ ID NO: 553; b. CDR-H2, comprising the amino acid sequence SEQ ID NO: 1095; and c. CDR-H3, comprising the amino acid sequence SEQ ID NO: 1637.

[0911] In one aspect, an antibody or antigen-binding fragment thereof is provided, wherein the antibody or antigen-binding fragment thereof comprises a light chain variable domain (VL) having at least 90%, 91%, 92%, 93%, 94%, 95%, 96%, 97%, 98%, 99%, or 100% sequence identity to the amino acid sequence SEQ ID NO: 282. In some embodiments, a VL sequence having at least 90%, 91%, 92%, 93%, 94%, 95%, 96%, 97%, 98%, or 99% identity contains substitutions (e.g., conservative substitutions), insertions, or deletions relative to the reference sequence, but an antibody or antigen-binding fragment thereof comprising that sequence retains the ability to bind to same antigen as the parent (e.g., cancer associated antigen). In some embodiments, a total of 1 to 10 amino acids have been substituted, inserted and/or deleted in the amino acid sequence SEQ ID NO: 282. In some embodiments, the substitutions, insertions, or deletions occur in regions outside the CDRs (e.g., in the FRs). Optionally, the antibody or antigen-binding fragment thereof comprises the VL sequence SEQ ID NO: 282, including one or more post-translational modifications of that sequence. In a particular embodiment, the VL comprises one, two or three CDRs selected from: a. CDR-L1, comprising the amino acid sequence SEQ ID NO: 824; b. CDR-L2, comprising the amino acid sequence SEQ ID NO: 1366; and c. CDR-L3, comprising the amino acid sequence SEQ ID NO: 1908.

[0912] In one aspect, an antibody or antigen-binding fragment thereof is provided, wherein the antibody or antigen-binding fragment thereof comprises a VH as in any of the embodiments provided above, and a VL as in any of the embodiments provided above. In some embodiments, the antibody or antigen-binding fragment thereof comprises the VH amino acid sequence of SEQ ID NO: 11, and the VL amino acid sequence of SEQ ID NO: 282, optionally including post-translational modifications of those sequences.

### TBLA1012

[0913] In one aspect, the present disclosure provides an antibody or antigen-binding fragment thereof comprising at least one or both variable regions selected from: a. VH comprising the amino acid sequence of SEQ ID NO: 12 and b. VL comprising the amino acid sequence of SEQ ID NO: 283.

[0914] In one aspect, the present disclosure provides an antibody or antigen-binding fragment thereof comprising at least one, two, three, four, five, or six CDRs selected from: a. CDR-H1 comprising the amino acid sequence of SEQ ID NO: 554; b. CDR-H2 comprising the amino acid sequence of SEQ ID NO: 1096; c. CDR-H3 comprising the amino acid sequence of SEQ ID NO: 1638; d. CDR-L1 comprising the amino acid sequence of SEQ ID NO: 825; e. CDR-L2 comprising the amino acid sequence of SEQ ID NO: 1367; and f. CDR-L3 comprising the amino acid sequence of SEQ ID NO: 1909.

[0915] In one aspect, the present disclosure provides an antibody or antigen-binding fragment thereof comprising: a. CDR-H1 comprising the amino acid sequence of SEQ ID NO: 554; b. CDR-H2 comprising the amino acid sequence of SEQ ID NO: 1096; c. CDR-H3 comprising the amino acid sequence of SEQ ID NO: 1638; d. CDR-L1 comprising the amino acid sequence of SEQ ID NO: 825; e. CDR-L2 comprising the amino acid sequence of SEQ ID NO: 1367; and f. CDR-L3 comprising the amino acid sequence of SEQ ID NO: 1909. In one aspect, the present disclosure provides an antibody or antigen-binding fragment thereof comprising a CDR-H3 comprising the amino acid sequence of SEQ ID NO: 1638 and a CDR-L3 comprising the amino acid sequence of SEQ ID NO: 1909.

[0916] In one aspect, the present disclosure provides an antibody or antigen-binding fragment thereof comprising at least one, at least two, or all three VH CDR sequences selected from: a. CDR-H1 comprising the amino acid sequence of SEQ ID NO: 554; b. CDR-H2 comprising the amino acid sequence of SEQ ID NO: 1096; c. CDR-H3 comprising the amino acid sequence of SEQ ID NO: 1638; and a VL comprising the amino acid sequence of SEQ ID NO: 283.

[0917] In one aspect, the present disclosure provides an antibody or antigen-binding fragment thereof comprising at least one, at least two, or all three VL CDR sequences selected from: a CDR-L1 comprising the amino acid sequence of SEQ ID NO: 825; b CDR-L2 comprising the amino acid sequence of SEQ ID NO: 1367; c CDR-L3 comprising the amino acid sequence of SEQ ID NO: 1909; and a VH comprising the amino acid sequence of SEQ ID NO: 12.

[0918] In one aspect, an antibody or antigen-binding fragment thereof is provided, wherein the antibody or antigen-binding fragment thereof comprises a heavy chain variable domain (VH) having at least 90%, 91%, 92%, 93%, 94%, 95%, 96%, 97%, 98%, 99%, or 100% sequence identity to the amino acid sequence SEQ ID NO: 12. In some embodiments, a VH sequence having at least 90%, 91%, 92%, 93%, 94%, 95%, 96%, 97%, 98%, or 99% identity contains substitutions (e.g., conservative substitutions), insertions, or deletions relative to the reference sequence, but an antibody or antigen-binding fragment thereof comprising that sequence retains the ability to bind to same antigen as of the parent (e.g., cancer associated antigen). In some embodiments, a total of 1 to 10 amino acids have been substituted, inserted and/or deleted in the amino acid sequence SEQ ID NO: 12. In some embodiments, substitutions, insertions, or deletions occur in regions outside the CDRs (e.g., in the FRs). Optionally, the antibody or antigen-binding fragment thereof comprises the VH sequence SEQ ID NO: 12, including one or more post-translational modifications of that sequence. In a particular embodiment, the VH comprises one, two or three CDRs selected from: a. CDR-H1, comprising the amino acid sequence SEQ ID NO: 554; b. CDR-H2, comprising the amino acid sequence SEQ ID NO: 1096; and c. CDR-H3, comprising the amino acid sequence SEQ ID NO: 1638.

[0919] In one aspect, an antibody or antigen-binding fragment thereof is provided, wherein the antibody or antigen-binding fragment thereof comprises a light chain variable domain (VL) having at least 90%, 91%, 92%, 93%, 94%, 95%, 96%, 97%, 98%, 99%, or 100% sequence identity to the amino acid sequence SEQ ID NO: 283. In some embodiments, a VL sequence having at least 90%, 91%, 92%, 93%, 94%, 95%, 96%, 97%, 98%, or 99% identity contains substitutions (e.g., conservative substitutions), insertions, or deletions relative to the reference sequence, but an antibody or antigen-binding fragment thereof comprising that sequence retains the ability to bind to same antigen as the parent (e.g., cancer associated antigen). In some embodiments, a total of 1 to 10 amino acids have been substituted, inserted and/or deleted in the amino acid sequence SEQ ID NO: 283. In some embodiments, the substitutions, insertions, or deletions occur in regions outside the CDRs (e.g., in the FRs). Optionally, the antibody or antigen-binding fragment thereof comprises the VL sequence SEQ ID NO: 283, including one or more post-translational modifications of that sequence. In a particular embodiment, the VL comprises one, two or three CDRs selected from: a. CDR-L1, comprising the amino acid sequence SEQ ID NO: 825; b. CDR-L2, comprising the amino acid sequence SEQ ID NO: 1367; and c. CDR-L3, comprising the amino acid sequence SEQ ID NO: 1909.

[0920] In one aspect, an antibody or antigen-binding fragment thereof is provided, wherein the antibody or antigen-binding fragment thereof comprises a VH as in any of the embodiments provided above, and a VL as in any of the embodiments provided above. In some embodiments, the antibody or antigen-binding fragment thereof comprises the VH amino acid sequence of SEQ ID NO: 12, and the VL amino acid sequence of SEQ ID NO: 283, optionally including post-translational modifications of those sequences.

### TBLA1013

[0921] In one aspect, the present disclosure provides an antibody or antigen-binding fragment thereof comprising at least one or both variable regions selected from: a. VH comprising the amino acid sequence of SEQ ID NO: 13 and b. VL comprising the amino acid sequence of SEQ ID NO: 284.

[0922] In one aspect, the present disclosure provides an antibody or antigen-binding fragment thereof comprising at least one, two, three, four, five, or six CDRs selected from: a. CDR-H1 comprising the amino acid sequence of SEQ ID NO: 555; b. CDR-H2 comprising the amino acid sequence of SEQ ID NO: 1097; c. CDR-H3 comprising the amino acid sequence of SEQ ID NO: 1639; d. CDR-L1 comprising the amino acid sequence of SEQ ID NO: 826; e. CDR-L2 comprising the amino acid sequence of SEQ ID NO: 1368; and f. CDR-L3 comprising the amino acid sequence of SEQ ID NO: 1910.

[0923] In one aspect, the present disclosure provides an antibody or antigen-binding fragment thereof comprising: a. CDR-H1 comprising the amino acid sequence of SEQ ID NO: 555; b. CDR-H2 comprising the amino acid sequence of SEQ ID NO: 1097; c. CDR-H3 comprising the amino acid sequence of SEQ ID NO: 1639; d. CDR-L1 comprising the amino acid sequence of SEQ ID NO: 826; e. CDR-L2 comprising the amino acid sequence of SEQ ID NO: 1368; and f. CDR-L3 comprising the amino acid sequence of SEQ ID NO: 1910. In one aspect, the present disclosure provides an antibody or antigen-binding fragment thereof comprising a CDR-H3 comprising the amino acid sequence of SEQ ID NO: 1639; and a CDR-L3 comprising the amino acid sequence of SEQ ID NO: 1910.

[0924] In one aspect, the present disclosure provides an antibody or antigen-binding fragment thereof comprising at least one, at least two, or all three VH CDR sequences selected from: a. CDR-H1 comprising the amino acid sequence of SEQ ID NO: 555; b. CDR-H2 comprising the amino acid sequence of SEQ ID NO: 1097; c. CDR-H3 comprising the amino acid sequence of SEQ ID NO: 1639; and a VL comprising the amino acid sequence of SEQ ID NO: 284.

[0925] In one aspect, the present disclosure provides an antibody or antigen-binding fragment thereof comprising at least one, at least two, or all three VL CDR sequences selected from: a. CDR-L1 comprising the amino acid sequence of SEQ ID NO: 826; b. CDR-L2 comprising the amino acid sequence of SEQ ID NO: 1368; c. CDR-L3 comprising the amino acid sequence of SEQ ID NO: 1910; and a VH comprising the amino acid sequence of SEQ ID NO: 13.

[0926] In one aspect, an antibody or antigen-binding fragment thereof is provided, wherein the antibody or antigen-binding fragment thereof comprises a heavy chain variable domain (VH) having at least 90%, 91%, 92%, 93%, 94%, 95%, 96%, 97%, 98%, 99%, or 100% sequence identity to the amino acid sequence SEQ ID NO: 13. In some embodiments, a VH sequence having at least 90%, 91%, 92%, 93%, 94%, 95%, 96%, 97%, 98%, or 99% identity contains substitutions (e.g., conservative substitutions), insertions, or deletions relative to the reference sequence, but an antibody or antigen-binding fragment thereof comprising that sequence retains the ability to bind to same antigen as of the parent (e.g., cancer associated antigen). In some embodiments, a total of 1 to 10 amino acids have been substituted, inserted and/or deleted in the amino acid sequence SEQ ID NO: 13. In some embodiments, substitutions, insertions, or deletions occur in regions outside the CDRs (e.g., in the FRs). Optionally, the antibody or antigen-binding fragment thereof comprises the VH sequence SEQ ID NO: 13, including one or more post-translational modifications of that sequence. In a particular embodiment, the VH comprises one, two or three CDRs selected from: a. CDR-H1, comprising the amino acid sequence SEQ ID NO: 555; b. CDR-H2, comprising the amino acid sequence SEQ ID NO: 1097; and c. CDR-H3, comprising the amino acid sequence SEQ ID NO: 1639.

[0927] In one aspect, an antibody or antigen-binding fragment thereof is provided, wherein the antibody or antigen-binding fragment thereof comprises a light chain variable domain (VL) having at least 90%, 91%, 92%, 93%, 94%, 95%, 96%, 97%, 98%, 99%, or 100% sequence identity to the amino acid sequence SEQ ID NO: 284. In some embodiments, a VL sequence having at least 90%, 91%, 92%, 93%, 94%, 95%, 96%, 97%, 98%, or 99% identity contains substitutions (e.g., conservative substitutions), insertions, or deletions relative to the reference sequence, but an antibody or antigen-binding fragment thereof comprising that sequence retains the ability to bind to same antigen as the parent (e.g., cancer associated antigen). In some embodiments, a total of 1 to 10 amino acids have been substituted, inserted and/or deleted in the amino acid sequence SEQ ID NO: 284. In some embodiments, the substitutions, insertions, or deletions occur in regions outside the CDRs (e.g., in the FRs). Optionally, the antibody or antigen-binding fragment thereof comprises the VL sequence SEQ ID NO: 284, including one or more post-translational modifications of that sequence. In a particular embodiment, the VL comprises one, two or three CDRs selected from: a. CDR-L1, comprising the amino acid sequence SEQ ID NO: 826; b. CDR-L2, comprising the amino acid sequence SEQ ID NO: 1368; and c. CDR-L3, comprising the amino acid sequence SEQ ID NO: 1910.

[0928] In one aspect, an antibody or antigen-binding fragment thereof is provided, wherein the antibody or antigen-binding fragment thereof comprises a VH as in any of the embodiments provided above, and a VL as in any of the embodiments provided above. In some embodiments, the antibody or antigen-binding fragment thereof comprises the VH amino acid sequence of SEQ ID NO: 13, and the VL amino acid sequence of SEQ ID NO: 284, optionally including post-translational modifications of those sequences.

### TBRE1001

[0929] In one aspect, the present disclosure provides an antibody or antigen-binding fragment thereof comprising at least one or both variable regions selected from: a. VH comprising the amino acid sequence of SEQ ID NO: 14 and b. VL comprising the amino acid sequence of SEQ ID NO: 285.

[0930] In one aspect, the present disclosure provides an antibody or antigen-binding fragment thereof comprising at least one, two, three, four, five, or six CDRs selected from: a. CDR-H1 comprising the amino acid sequence of SEQ ID NO: 556; b. CDR-H2 comprising the amino acid sequence of SEQ ID NO: 1098; c. CDR-H3 comprising the amino acid sequence of SEQ ID NO: 1640; d. CDR-L1 comprising the amino acid sequence of SEQ ID NO: 827; e. CDR-L2 comprising the amino acid sequence of SEQ ID NO: 1369; and f. CDR-L3 comprising the amino acid sequence of SEQ ID NO: 1911.

[0931] In one aspect, the present disclosure provides an antibody or antigen-binding fragment thereof comprising: a. CDR-H1 comprising the amino acid sequence of SEQ ID NO: 556; b. CDR-H2 comprising the amino acid sequence of SEQ ID NO: 1098; c. CDR-H3 comprising the amino acid sequence of SEQ ID NO: 1640; d. CDR-L1 comprising the amino acid sequence of SEQ ID NO: 827; e. CDR-L2 comprising the amino acid sequence of SEQ ID NO: 1369; and f. CDR-L3 comprising the amino acid sequence of SEQ ID NO: 1911. In one aspect, the present disclosure provides an antibody or antigen-binding fragment thereof comprising a CDR-H3 comprising the amino acid sequence of SEQ ID NO: 1640; and a CDR-L3 comprising the amino acid sequence of SEQ ID NO: 1911.

[0932] In one aspect, the present disclosure provides an antibody or antigen-binding fragment thereof comprising at least one, at least two, or all three VH CDR sequences selected from: a. CDR-H1 comprising the amino acid sequence of SEQ ID NO: 556; b. CDR-H2 comprising the amino acid sequence of SEQ ID NO: 1098; c. CDR-H3 comprising the amino acid sequence of SEQ ID NO: 1640; and a VL comprising the amino acid sequence of SEQ ID NO: 285.

[0933] In one aspect, the present disclosure provides an antibody or antigen-binding fragment thereof comprising at least one, at least two, or all three VL CDR sequences selected from: a. CDR-L1 comprising the amino acid sequence of SEQ ID NO: 827; b. CDR-L2 comprising the amino acid sequence of SEQ ID NO: 1369; c. CDR-L3 comprising the amino acid sequence of SEQ ID NO: 1911; and a VH comprising the amino acid sequence of SEQ ID NO: 14.

[0934] In one aspect, an antibody or antigen-binding fragment thereof is provided, wherein the antibody or antigen-binding fragment thereof comprises a heavy chain variable domain (VH) having at least 90%, 91%, 92%, 93%, 94%, 95%, 96%, 97%, 98%, 99%, or 100% sequence identity to the amino acid sequence SEQ ID NO: 14. In some embodiments, a VH sequence having at least 90%, 91%, 92%, 93%, 94%, 95%, 96%, 97%, 98%, or 99% identity contains substitutions (e.g., conservative substitutions), insertions, or deletions relative to the reference sequence, but an antibody or antigen-binding fragment thereof comprising that sequence retains the ability to bind to same antigen as of the parent (e.g., cancer associated antigen). In some embodiments, a total of 1 to 10 amino acids have been substituted, inserted and/or deleted in the amino acid sequence SEQ ID NO: 14. In some embodiments, substitutions, insertions, or deletions occur in regions outside the CDRs (e.g., in the FRs). Optionally, the antibody or antigen-binding fragment thereof comprises the VH sequence SEQ ID NO: 14, including one or more post-translational modifications of that sequence. In a particular embodiment, the VH comprises one, two or three CDRs selected from: a. CDR-H1, comprising the amino acid sequence SEQ ID NO: 556; b. CDR-H2, comprising the amino acid sequence SEQ ID NO: 1098; and c. CDR-H3, comprising the amino acid sequence SEQ ID NO: 1640.

[0935] In one aspect, an antibody or antigen-binding fragment thereof is provided, wherein the antibody or antigen-binding fragment thereof comprises a light chain variable domain (VL) having at least 90%, 91%, 92%, 93%, 94%, 95%, 96%, 97%, 98%, 99%, or 100% sequence identity to the amino acid sequence SEQ ID NO: 285. In some embodiments, a VL sequence having at least 90%, 91%, 92%, 93%, 94%, 95%, 96%, 97%, 98%, or 99% identity contains substitutions (e.g., conservative substitutions), insertions, or deletions relative to the reference sequence, but an antibody or antigen-binding fragment thereof comprising that sequence retains the ability to bind to same antigen as the parent (e.g., cancer associated antigen). In some embodiments, a total of 1 to 10 amino acids have been substituted, inserted and/or deleted in the amino acid sequence SEQ ID NO: 285. In some embodiments, the substitutions, insertions, or deletions occur in regions outside the CDRs (e.g., in the FRs). Optionally, the antibody or antigen-binding fragment thereof comprises the VL sequence SEQ ID NO: 285, including one or more post-translational modifications of that sequence. In a particular embodiment, the VL comprises one, two or three CDRs selected from: a. CDR-L1, comprising the amino acid sequence SEQ ID NO: 827; b. CDR-L2, comprising the amino acid sequence SEQ ID NO: 1369; and c. CDR-L3, comprising the amino acid sequence SEQ ID NO: 1911.

[0936] In one aspect, an antibody or antigen-binding fragment thereof is provided, wherein the antibody or antigen-binding fragment thereof comprises a VH as in any of the embodiments provided above, and a VL as in any of the embodiments provided above. In some embodiments, the antibody or antigen-binding fragment thereof comprises the VH amino acid sequence of SEQ ID NO: 14, and the VL amino acid sequence of SEQ ID NO: 285, optionally including post-translational modifications of those sequences.

### TBRE1002

[0937] In one aspect, the present disclosure provides an antibody or antigen-binding fragment thereof comprising at least one or both variable regions selected from: a. VH comprising the amino acid sequence of SEQ ID NO: 15 and b. VL comprising the amino acid sequence of SEQ ID NO: 286.

[0938] In one aspect, the present disclosure provides an antibody or antigen-binding fragment thereof comprising at least one, two, three, four, five, or six CDRs selected from: a. CDR-H1 comprising the amino acid sequence of SEQ ID NO: 557; b. CDR-H2 comprising the amino acid sequence of SEQ ID NO: 1099; c. CDR-H3 comprising the amino acid sequence of SEQ ID NO: 1641; d. CDR-L1 comprising the amino acid sequence of SEQ ID NO: 828; e. CDR-L2 comprising the amino acid sequence of SEQ ID NO: 1370; and f. CDR-L3 comprising the amino acid sequence of SEQ ID NO: 1912.

[0939] In one aspect, the present disclosure provides an antibody or antigen-binding fragment thereof comprising: a. CDR-H1 comprising the amino acid sequence of SEQ ID NO: 557; b. CDR-H2 comprising the amino acid sequence of SEQ ID NO: 1099; c. CDR-H3 comprising the amino acid sequence of SEQ ID NO: 1641; d. CDR-L1 comprising the amino acid sequence of SEQ ID NO: 828; e. CDR-L2 comprising the amino acid sequence of SEQ ID NO: 1370; and f. CDR-L3 comprising the amino acid sequence of SEQ ID NO: 1912. In one aspect, the present disclosure provides an antibody or antigen-binding fragment thereof comprising a CDR-H3 comprising the amino acid sequence of SEQ ID NO: 1641; and a CDR-L3 comprising the amino acid sequence of SEQ ID NO: 1912.

[0940] In one aspect, the present disclosure provides an antibody or antigen-binding fragment thereof comprising at least one, at least two, or all three VH CDR sequences selected from: a. CDR-H1 comprising the amino acid sequence of SEQ ID NO: 557; b. CDR-H2 comprising the amino acid sequence of SEQ ID NO: 1099; c. CDR-H3 comprising the amino acid sequence of SEQ ID NO: 1641; and a VL comprising the amino acid sequence of SEQ ID NO: 286.

[0941] In one aspect, the present disclosure provides an antibody or antigen-binding fragment thereof comprising at least one, at least two, or all three VL CDR sequences selected from: a. CDR-L1 comprising the amino acid sequence of SEQ ID NO: 828; b. CDR-L2 comprising the amino acid sequence of SEQ ID NO: 1370; c. CDR-L3 comprising the amino acid sequence of SEQ ID NO: 1912; and a VH comprising the amino acid sequence of SEQ ID NO: 15.

[0942] In one aspect, an antibody or antigen-binding fragment thereof is provided, wherein the antibody or antigen-binding fragment thereof comprises a heavy chain variable domain (VH) having at least 90%, 91%, 92%, 93%, 94%, 95%, 96%, 97%, 98%, 99%, or 100% sequence identity to the amino acid sequence SEQ ID NO: 15. In some embodiments, a VH sequence having at least 90%, 91%, 92%, 93%, 94%, 95%, 96%, 97%, 98%, or 99% identity contains substitutions (e.g., conservative substitutions), insertions, or deletions relative to the reference sequence, but an antibody or antigen-binding fragment thereof comprising that sequence retains the ability to bind to same antigen as of the parent (e.g., cancer associated antigen). In some embodiments, a total of 1 to 10 amino acids have been substituted, inserted and/or deleted in the amino acid sequence SEQ ID NO: 15. In some embodiments, substitutions, insertions, or deletions occur in regions outside the CDRs (e.g., in the FRs). Optionally, the antibody or antigen-binding fragment thereof comprises the VH sequence SEQ ID NO: 15, including one or more post-translational modifications of that sequence. In a particular embodiment, the VH comprises one, two or three CDRs selected from: a. CDR-H1, comprising the amino acid sequence SEQ ID NO: 557; b. CDR-H2, comprising the amino acid sequence SEQ ID NO: 1099; and c. CDR-H3, comprising the amino acid sequence SEQ ID NO: 1641.

[0943] In one aspect, an antibody or antigen-binding fragment thereof is provided, wherein the antibody or antigen-binding fragment thereof comprises a light chain variable domain (VL) having at least 90%, 91%, 92%, 93%, 94%, 95%, 96%, 97%, 98%, 99%, or 100% sequence identity to the amino acid sequence SEQ ID NO: 286. In some embodiments, a VL sequence having at least 90%, 91%, 92%, 93%, 94%, 95%, 96%, 97%, 98%, or 99% identity contains substitutions (e.g., conservative substitutions), insertions, or deletions relative to the reference sequence, but an antibody or antigen-binding fragment thereof comprising that sequence retains the ability to bind to same antigen as the parent (e.g., cancer associated antigen). In some embodiments, a total of 1 to 10 amino acids have been substituted, inserted and/or deleted in the amino acid sequence SEQ ID NO: 286. In some embodiments, the substitutions, insertions, or deletions occur in regions outside the CDRs (e.g., in the FRs). Optionally, the antibody or antigen-binding fragment thereof comprises the VL sequence SEQ ID NO: 286, including one or more post-translational modifications of that sequence. In a particular embodiment, the VL comprises one, two or three CDRs selected from: a. CDR-L1, comprising the amino acid sequence SEQ ID NO: 828; b. CDR-L2, comprising the amino acid sequence SEQ ID NO: 1370; and c. CDR-L3, comprising the amino acid sequence SEQ ID NO: 1912.

[0944] In one aspect, an antibody or antigen-binding fragment thereof is provided, wherein the antibody or antigen-binding fragment thereof comprises a VH as in any of the embodiments provided above, and a VL as in any of the embodiments provided above. In some embodiments, the antibody or antigen-binding fragment thereof comprises the VH amino acid sequence of SEQ ID NO: 15, and the VL amino acid sequence of SEQ ID NO: 286, optionally including post-translational modifications of those sequences.

### TBRE1003

[0945] In one aspect, the present disclosure provides an antibody or antigen-binding fragment thereof comprising at least one or both variable regions selected from: a. VH comprising the amino acid sequence of SEQ ID NO: 16 and b. VL comprising the amino acid sequence of SEQ ID NO: 287.

[0946] In one aspect, the present disclosure provides an antibody or antigen-binding fragment thereof comprising at least one, two, three, four, five, or six CDRs selected from: a. CDR-H1 comprising the amino acid sequence of SEQ ID NO: 558; b. CDR-H2 comprising the amino acid sequence of SEQ ID NO: 1100; c. CDR-H3 comprising the amino acid sequence of SEQ ID NO: 1642; d. CDR-L1 comprising the amino acid sequence of SEQ ID NO: 829; e. CDR-L2 comprising the amino acid sequence of SEQ ID NO: 1371; and f. CDR-L3 comprising the amino acid sequence of SEQ ID NO: 1913.

[0947] In one aspect, the present disclosure provides an antibody or antigen-binding fragment thereof comprising: a. CDR-H1 comprising the amino acid sequence of SEQ ID NO: 558; b. CDR-H2 comprising the amino acid sequence of SEQ ID NO: 1100; c. CDR-H3 comprising the amino acid sequence of SEQ ID NO: 1642; d. CDR-L1 comprising the amino acid sequence of SEQ ID NO: 829; e. CDR-L2 comprising the amino acid sequence of SEQ ID NO: 1371; and f. CDR-L3 comprising the amino acid sequence of SEQ ID NO: 1913. In one aspect, the present disclosure provides an antibody or antigen-binding fragment thereof comprising a CDR-H3 comprising the amino acid sequence of SEQ ID NO: 1642; and a CDR-L3 comprising the amino acid sequence of SEQ ID NO: 1913.

[0948] In one aspect, the present disclosure provides an antibody or antigen-binding fragment thereof comprising at least one, at least two, or all three VH CDR sequences selected from: a. CDR-H1 comprising the amino acid sequence of SEQ ID NO: 558; b. CDR-H2 comprising the amino acid sequence of SEQ ID NO: 1100; c. CDR-H3 comprising the amino acid sequence of SEQ ID NO: 1642; and a VL comprising the amino acid sequence of SEQ ID NO: 287.

[0949] In one aspect, the present disclosure provides an antibody or antigen-binding fragment thereof comprising at least one, at least two, or all three VL CDR sequences selected from: a. CDR-L1 comprising the amino acid sequence of SEQ ID NO: 829; b. CDR-L2 comprising the amino acid sequence of SEQ ID NO: 1371; c. CDR-L3 comprising the amino acid sequence of SEQ ID NO: 1913; and a VH comprising the amino acid sequence of SEQ ID NO: 16.

[0950] In one aspect, an antibody or antigen-binding fragment thereof is provided, wherein the antibody or antigen-binding fragment thereof comprises a heavy chain variable domain (VH) having at least 90%, 91%, 92%, 93%, 94%, 95%, 96%, 97%, 98%, 99%, or 100% sequence identity to the amino acid sequence SEQ ID NO: 16. In some embodiments, a VH sequence having at least 90%, 91%, 92%, 93%, 94%, 95%, 96%, 97%, 98%, or 99% identity contains substitutions (e.g., conservative substitutions), insertions, or deletions relative to the reference sequence, but an antibody or antigen-binding fragment thereof comprising that sequence retains the ability to bind to same antigen as of the parent (e.g., cancer associated antigen). In some embodiments, a total of 1 to 10 amino acids have been substituted, inserted and/or deleted in the amino acid sequence SEQ ID NO: 16. In some embodiments, substitutions, insertions, or deletions occur in regions outside the CDRs (e.g., in the FRs). Optionally, the antibody or antigen-binding fragment thereof comprises the VH sequence SEQ ID NO: 16, including one or more post-translational modifications of that sequence. In a particular embodiment, the VH comprises one, two or three CDRs selected from: a. CDR-H1, comprising the amino acid sequence SEQ ID NO: 558; b. CDR-H2, comprising the amino acid sequence SEQ ID NO: 1100; and c. CDR-H3, comprising the amino acid sequence SEQ ID NO: 1642.

[0951] In one aspect, an antibody or antigen-binding fragment thereof is provided, wherein the antibody or antigen-binding fragment thereof comprises a light chain variable domain (VL) having at least 90%, 91%, 92%, 93%, 94%, 95%, 96%, 97%, 98%, 99%, or 100% sequence identity to the amino acid sequence SEQ ID NO: 287. In some embodiments, a VL sequence having at least 90%, 91%, 92%, 93%, 94%, 95%, 96%, 97%, 98%, or 99% identity contains substitutions (e.g., conservative substitutions), insertions, or deletions relative to the reference sequence, but an antibody or antigen-binding fragment thereof comprising that sequence retains the ability to bind to same antigen as the parent (e.g., cancer associated antigen). In some embodiments, a total of 1 to 10 amino acids have been substituted, inserted and/or deleted in the amino acid sequence SEQ ID NO: 287. In some embodiments, the substitutions, insertions, or deletions occur in regions outside the CDRs (e.g., in the FRs). Optionally, the antibody or antigen-binding fragment thereof comprises the VL sequence SEQ ID NO: 287, including one or more post-translational modifications of that sequence. In a particular embodiment, the VL comprises one, two or three CDRs selected from: a. CDR-L1, comprising the amino acid sequence SEQ ID NO: 829; b. CDR-L2, comprising the amino acid sequence SEQ ID NO: 1371; and c. CDR-L3, comprising the amino acid sequence SEQ ID NO: 1913.

[0952] In one aspect, an antibody or antigen-binding fragment thereof is provided, wherein the antibody or antigen-binding fragment thereof comprises a VH as in any of the embodiments provided above, and a VL as in any of the embodiments provided above. In some embodiments, the antibody or antigen-binding fragment thereof comprises the VH amino acid sequence of SEQ ID NO: 16, and the VL amino acid sequence of SEQ ID NO: 287, optionally including post-translational modifications of those sequences.

### TBRE1004

[0953] In one aspect, the present disclosure provides an antibody or antigen-binding fragment thereof comprising at least one or both variable regions selected from: a. VH comprising the amino acid sequence of SEQ ID NO: 17 and b. VL comprising the amino acid sequence of SEQ ID NO: 288.

[0954] In one aspect, the present disclosure provides an antibody or antigen-binding fragment thereof comprising at least one, two, three, four, five, or six CDRs selected from: a. CDR-H1 comprising the amino acid sequence of SEQ ID NO: 559; b. CDR-H2 comprising the amino acid sequence of SEQ ID NO: 1101; c. CDR-H3 comprising the amino acid sequence of SEQ ID NO: 1643; d. CDR-L1 comprising the amino acid sequence of SEQ ID NO: 830; e. CDR-L2 comprising the amino acid sequence of SEQ ID NO: 1372; and f. CDR-L3 comprising the amino acid sequence of SEQ ID NO: 1914.

[0955] In one aspect, the present disclosure provides an antibody or antigen-binding fragment thereof comprising: a. CDR-H1 comprising the amino acid sequence of SEQ ID NO: 559; b. CDR-H2 comprising the amino acid sequence of SEQ ID NO: 1101; c. CDR-H3 comprising the amino acid sequence of SEQ ID NO: 1643; d. CDR-L1 comprising the amino acid sequence of SEQ ID NO: 830; e. CDR-L2 comprising the amino acid sequence of SEQ ID NO: 1372; and f. CDR-L3 comprising the amino acid sequence of SEQ ID NO: 1914. In one aspect, the present disclosure provides an antibody or antigen-binding fragment thereof comprising a CDR-H3 comprising the amino acid sequence of SEQ ID NO: 1643; and a CDR-L3 comprising the amino acid sequence of SEQ ID NO: 1914.

[0956] In one aspect, the present disclosure provides an antibody or antigen-binding fragment thereof comprising at least one, at least two, or all three VH CDR sequences selected from: a. CDR-H1 comprising the amino acid sequence of SEQ ID NO: 559; b. CDR-H2 comprising the amino acid sequence of SEQ ID NO: 1101; c. CDR-H3 comprising the amino acid sequence of SEQ ID NO: 1643; and a VL comprising the amino acid sequence of SEQ ID NO: 288.

[0957] In one aspect, the present disclosure provides an antibody or antigen-binding fragment thereof comprising at least one, at least two, or all three VL CDR sequences selected from: a. CDR-L1 comprising the amino acid sequence of SEQ ID NO: 830; b. CDR-L2 comprising the amino acid sequence of SEQ ID NO: 1372; c. CDR-L3 comprising the amino acid sequence of SEQ ID NO: 1914; and a VH comprising the amino acid sequence of SEQ ID NO: 17.

[0958] In one aspect, an antibody or antigen-binding fragment thereof is provided, wherein the antibody or antigen-binding fragment thereof comprises a heavy chain variable domain (VH) having at least 90%, 91%, 92%, 93%, 94%, 95%, 96%, 97%, 98%, 99%, or 100% sequence identity to the amino acid sequence SEQ ID NO: 17. In some embodiments, a VH sequence having at least 90%, 91%, 92%, 93%, 94%, 95%, 96%, 97%, 98%, or 99% identity contains substitutions (e.g., conservative substitutions), insertions, or deletions relative to the reference sequence, but an antibody or antigen-binding fragment thereof comprising that sequence retains the ability to bind to same antigen as of the parent (e.g., cancer associated antigen). In some embodiments, a total of 1 to 10 amino acids have been substituted, inserted and/or deleted in the amino acid sequence SEQ ID NO: 17. In some embodiments, substitutions, insertions, or deletions occur in regions outside the CDRs (e.g., in the FRs). Optionally, the antibody or antigen-binding fragment thereof comprises the VH sequence SEQ ID NO: 17, including one or more post-translational modifications of that sequence. In a particular embodiment, the VH comprises one, two or three CDRs selected from: a. CDR-H1, comprising the amino acid sequence SEQ ID NO: 559; b. CDR-H2, comprising the amino acid sequence SEQ ID NO: 1101; and c. CDR-H3, comprising the amino acid sequence SEQ ID NO: 1643.

[0959] In one aspect, an antibody or antigen-binding fragment thereof is provided, wherein the antibody or antigen-binding fragment thereof comprises a light chain variable domain (VL) having at least 90%, 91%, 92%, 93%, 94%, 95%, 96%, 97%, 98%, 99%, or 100% sequence identity to the amino acid sequence SEQ ID NO: 288. In some embodiments, a VL sequence having at least 90%, 91%, 92%, 93%, 94%, 95%, 96%, 97%, 98%, or 99% identity contains substitutions (e.g., conservative substitutions), insertions, or deletions relative to the reference sequence, but an antibody or antigen-binding fragment thereof comprising that sequence retains the ability to bind to same antigen as the parent (e.g., cancer associated antigen). In some embodiments, a total of 1 to 10 amino acids have been substituted, inserted and/or deleted in the amino acid sequence SEQ ID NO: 288. In some embodiments, the substitutions, insertions, or deletions occur in regions outside the CDRs (e.g., in the FRs). Optionally, the antibody or antigen-binding fragment thereof comprises the VL sequence SEQ ID NO: 288, including one or more post-translational modifications of that sequence. In a particular embodiment, the VL comprises one, two or three CDRs selected from: a. CDR-L1, comprising the amino acid sequence SEQ ID NO: 830; b. CDR-L2, comprising the amino acid sequence SEQ ID NO: 1372; and c. CDR-L3, comprising the amino acid sequence SEQ ID NO: 1914.

[0960] In one aspect, an antibody or antigen-binding fragment thereof is provided, wherein the antibody or antigen-binding fragment thereof comprises a VH as in any of the embodiments provided above, and a VL as in any of the embodiments provided above. In some embodiments, the antibody or antigen-binding fragment thereof comprises the VH amino acid sequence of SEQ ID NO: 17, and the VL amino acid sequence of SEQ ID NO: 288, optionally including post-translational modifications of those sequences.

### TBRE1005

[0961] In one aspect, the present disclosure provides an antibody or antigen-binding fragment thereof comprising at least one or both variable regions selected from: a. VH comprising the amino acid sequence of SEQ ID NO: 18 and b. VL comprising the amino acid sequence of SEQ ID NO: 289.

[0962] In one aspect, the present disclosure provides an antibody or antigen-binding fragment thereof comprising at least one, two, three, four, five, or six CDRs selected from: a. CDR-H1 comprising the amino acid sequence of SEQ ID NO: 560; b. CDR-H2 comprising the amino acid sequence of SEQ ID NO: 1102; c. CDR-H3 comprising the amino acid sequence of SEQ ID NO: 1644; d. CDR-L1 comprising the amino acid sequence of SEQ ID NO: 831; e. CDR-L2 comprising the amino acid sequence of SEQ ID NO: 1373; and f. CDR-L3 comprising the amino acid sequence of SEQ ID NO: 1915.

[0963] In one aspect, the present disclosure provides an antibody or antigen-binding fragment thereof comprising: a. CDR-H1 comprising the amino acid sequence of SEQ ID NO: 560; b. CDR-H2 comprising the amino acid sequence of SEQ ID NO: 1102; c. CDR-H3 comprising the amino acid sequence of SEQ ID NO: 1644; d. CDR-L1 comprising the amino acid sequence of SEQ ID NO: 831; e. CDR-L2 comprising the amino acid sequence of SEQ ID NO: 1373; and f. CDR-L3 comprising the amino acid sequence of SEQ ID NO: 1915. In one aspect, the present disclosure provides an antibody or antigen-binding fragment thereof comprising a CDR-H3 comprising the amino acid sequence of SEQ ID NO: 1644; and a CDR-L3 comprising the amino acid sequence of SEQ ID NO: 1915.

[0964] In one aspect, the present disclosure provides an antibody or antigen-binding fragment thereof comprising at least one, at least two, or all three VH CDR sequences selected from: a. CDR-H1 comprising the amino acid sequence of SEQ ID NO: 560; b. CDR-H2 comprising the amino acid sequence of SEQ ID NO: 1102; c. CDR-H3 comprising the amino acid sequence of SEQ ID NO: 1644; and a VL comprising the amino acid sequence of SEQ ID NO: 289.

[0965] In one aspect, the present disclosure provides an antibody or antigen-binding fragment thereof comprising at least one, at least two, or all three VL CDR sequences selected from: a. CDR-L1 comprising the amino acid sequence of SEQ ID NO: 831; b. CDR-L2 comprising the amino acid sequence of SEQ ID NO: 1373; c. CDR-L3 comprising the amino acid sequence of SEQ ID NO: 1915; and a VH comprising the amino acid sequence of SEQ ID NO: 18.

[0966] In one aspect, an antibody or antigen-binding fragment thereof is provided, wherein the antibody or antigen-binding fragment thereof comprises a heavy chain variable domain (VH) having at least 90%, 91%, 92%, 93%, 94%, 95%, 96%, 97%, 98%, 99%, or 100% sequence identity to the amino acid sequence SEQ ID NO: 18. In some embodiments, a VH sequence having at least 90%, 91%, 92%, 93%, 94%, 95%, 96%, 97%, 98%, or 99% identity contains substitutions (e.g., conservative substitutions), insertions, or deletions relative to the reference sequence, but an antibody or antigen-binding fragment thereof comprising that sequence retains the ability to bind to same antigen as of the parent (e.g., cancer associated antigen). In some embodiments, a total of 1 to 10 amino acids have been substituted, inserted and/or deleted in the amino acid sequence SEQ ID NO: 18. In some embodiments, substitutions, antigen-binding fragment thereof comprises the VH sequence SEQ ID NO: 18, including one or more post-translational modifications of that sequence. In a particular embodiment, the VH comprises one, two or three CDRs selected from: a. CDR-H1, comprising the amino acid sequence SEQ ID NO: 560; b. CDR-H2, comprising the amino acid sequence SEQ ID NO: 1102; and c. CDR-H3, comprising the amino acid sequence SEQ ID NO: 1644.

[0967] In one aspect, an antibody or antigen-binding fragment thereof is provided, wherein the antibody or antigen-binding fragment thereof comprises a light chain variable domain (VL) having at least 90%, 91%, 92%, 93%, 94%, 95%, 96%, 97%, 98%, 99%, or 100% sequence identity to the amino acid sequence SEQ ID NO: 289. In some embodiments, a VL sequence having at least 90%, 91%, 92%, 93%, 94%, 95%, 96%, 97%, 98%, or 99% identity contains substitutions (e.g., conservative substitutions), insertions, or deletions relative to the reference sequence, but an antibody or antigen-binding fragment thereof comprising that sequence retains the ability to bind to same antigen as the parent (e.g., cancer associated antigen). In some embodiments, a total of 1 to 10 amino acids have been substituted, inserted and/or deleted in the amino acid sequence SEQ ID NO: 289. In some embodiments, the substitutions, insertions, or deletions occur in regions outside the CDRs (e.g., in the FRs). Optionally, the antibody or antigen-binding fragment thereof comprises the VL sequence SEQ ID NO: 289, including one or more post-translational modifications of that sequence. In a particular embodiment, the VL comprises one, two or three CDRs selected from: a. CDR-L1, comprising the amino acid sequence SEQ ID NO: 831; b. CDR-L2, comprising the amino acid sequence SEQ ID NO: 1373; and c. CDR-L3, comprising the amino acid sequence SEQ ID NO: 1915.

[0968] In one aspect, an antibody or antigen-binding fragment thereof is provided, wherein the antibody or antigen-binding fragment thereof comprises a VH as in any of the embodiments provided above, and a VL as in any of the embodiments provided above. In some embodiments, the antibody or antigen-binding fragment thereof comprises the VH amino acid sequence of SEQ ID NO: 18, and the VL amino acid sequence of SEQ ID NO: 289, optionally including post-translational modifications of those sequences.

### TBRE1006

[0969] In one aspect, the present disclosure provides an antibody or antigen-binding fragment thereof comprising at least one or both variable regions selected from: a. VH comprising the amino acid sequence of SEQ ID NO: 19 and b. VL comprising the amino acid sequence of SEQ ID NO: 290.

[0970] In one aspect, the present disclosure provides an antibody or antigen-binding fragment thereof comprising at least one, two, three, four, five, or six CDRs selected from: a. CDR-H1 comprising the amino acid sequence of SEQ ID NO: 561; b. CDR-H2 comprising the amino acid sequence of SEQ ID NO: 1103; c. CDR-H3 comprising the amino acid sequence of SEQ ID NO: 1645; d. CDR-L1 comprising the amino acid sequence of SEQ ID NO: 832; e. CDR-L2 comprising the amino acid sequence of SEQ ID NO: 1374; and f. CDR-L3 comprising the amino acid sequence of SEQ ID NO: 1916.

[0971] In one aspect, the present disclosure provides an antibody or antigen-binding fragment thereof comprising: a. CDR-H1 comprising the amino acid sequence of SEQ ID NO: 561; b. CDR-H2 comprising the amino acid sequence of SEQ ID NO: 1103; c. CDR-H3 comprising the amino acid sequence of SEQ ID NO: 1645; d. CDR-L1 comprising the amino acid sequence of SEQ ID NO: 832; e. CDR-L2 comprising the amino acid sequence of SEQ ID NO: 1374; and f. CDR-L3 comprising the amino acid sequence of SEQ ID NO: 1916. In one aspect, the present disclosure provides an antibody or antigen-binding fragment thereof comprising a CDR-H3 comprising the amino acid sequence of SEQ ID NO: 1645; and a CDR-L3 comprising the amino acid sequence of SEQ ID NO: 1916.

[0972] In one aspect, the present disclosure provides an antibody or antigen-binding fragment thereof comprising at least one, at least two, or all three VH CDR sequences selected from: a. CDR-H1 comprising the amino acid sequence of SEQ ID NO: 561; b. CDR-H2 comprising the amino acid sequence of SEQ ID NO: 1103; c. CDR-H3 comprising the amino acid sequence of SEQ ID NO: 1645; and a VL comprising the amino acid sequence of SEQ ID NO: 290.

[0973] In one aspect, the present disclosure provides an antibody or antigen-binding fragment thereof comprising at least one, at least two, or all three VL CDR sequences selected from: a. CDR-L1 comprising the amino acid sequence of SEQ ID NO: 832; c. CDR-L2 comprising the amino acid sequence of SEQ ID NO: 1374; b. CDR-L3 comprising the amino acid sequence of SEQ ID NO: 1916, and a VH comprising the amino acid sequence of SEQ ID NO: 19.

[0974] In one aspect, an antibody or antigen-binding fragment thereof is provided, wherein the antibody or antigen-binding fragment thereof comprises a heavy chain variable domain (VH) having at least 90%, 91%, 92%, 93%, 94%, 95%, 96%, 97%, 98%, 99%, or 100% sequence identity to the amino acid sequence SEQ ID NO: 19. In some embodiments, a VH sequence having at least 90%, 91%, 92%, 93%, 94%, 95%, 96%, 97%, 98%, or 99% identity contains substitutions (e.g., conservative substitutions), insertions, or deletions relative to the reference sequence, but an antibody or antigen-binding fragment thereof comprising that sequence retains the ability to bind to same antigen as of the parent (e.g., cancer associated antigen). In some embodiments, a total of 1 to 10 amino acids have been substituted, inserted and/or deleted in the amino acid sequence SEQ ID NO: 19. In some embodiments, substitutions, insertions, or deletions occur in regions outside the CDRs (e.g., in the FRs). Optionally, the antibody or antigen-binding fragment thereof comprises the VH sequence SEQ ID NO: 19, including one or more post-translational modifications of that sequence. In a particular embodiment, the VH comprises one, two or three CDRs selected from: a. CDR-H1, comprising the amino acid sequence SEQ ID NO: 561; b. CDR-H2, comprising the amino acid sequence SEQ ID NO: 1103; and c. CDR-H3, comprising the amino acid sequence SEQ ID NO: 1645.

[0975] In one aspect, an antibody or antigen-binding fragment thereof is provided, wherein the antibody or antigen-binding fragment thereof comprises a light chain variable domain (VL) having at least 90%, 91%, 92%, 93%, 94%, 95%, 96%, 97%, 98%, 99%, or 100% sequence identity to the amino acid sequence SEQ ID NO: 290. In some embodiments, a VL sequence having at least 90%, 91%, 92%, 93%, 94%, 95%, 96%, 97%, 98%, or 99% identity contains substitutions (e.g., conservative substitutions), insertions, or deletions relative to the reference sequence, but an antibody or antigen-binding fragment thereof comprising that sequence retains the ability to bind to same antigen as the parent (e.g., cancer associated antigen). In some embodiments, a total of 1 to 10 amino acids have been substituted, inserted and/or deleted in the amino acid sequence SEQ ID NO: 290. In some embodiments, the substitutions, insertions, or deletions occur in regions outside the CDRs (e.g., in the FRs). Optionally, the antibody or antigen-binding fragment thereof comprises the VL sequence SEQ ID NO: 290, including one or more post-translational modifications of that sequence. In a particular embodiment, the VL comprises one, two or three CDRs selected from: a. CDR-L1, comprising the amino acid sequence SEQ ID NO: 832; b. CDR-L2, comprising the amino acid sequence SEQ ID NO: 1374; and c. CDR-L3, comprising the amino acid sequence SEQ ID NO: 1916.

[0976] In one aspect, an antibody or antigen-binding fragment thereof is provided, wherein the antibody or antigen-binding fragment thereof comprises a VH as in any of the embodiments provided above, and a VL as in any of the embodiments provided above. In some embodiments, the antibody or antigen-binding fragment thereof comprises the VH amino acid sequence of SEQ ID NO: 19, and the VL amino acid sequence of SEQ ID NO: 290, optionally including post-translational modifications of those sequences.

[0977] TBRE1007

[0978] In one aspect, the present disclosure provides an antibody or antigen-binding fragment thereof comprising at least one or both variable regions selected from: a. VH comprising the amino acid sequence of SEQ ID NO: 20 and b. VL comprising the amino acid sequence of SEQ ID NO: 291.

[0979] In one aspect, the present disclosure provides an antibody or antigen-binding fragment thereof comprising at least one, two, three, four, five, or six CDRs selected from: a. CDR-H1 comprising the amino acid sequence of SEQ ID NO: 562; b. CDR-H2 comprising the amino acid sequence of SEQ ID NO: 1104; c. CDR-H3 comprising the amino acid sequence of SEQ ID NO: 1646; d. CDR-L1 comprising the amino acid sequence of SEQ ID NO: 833; e. CDR-L2 comprising the amino acid sequence of SEQ ID NO: 1375; and f. CDR-L3 comprising the amino acid sequence of SEQ ID NO: 1917.

[0980] In one aspect, the present disclosure provides an antibody or antigen-binding fragment thereof comprising: a. CDR-H1 comprising the amino acid sequence of SEQ ID NO: 562; b. CDR-H2 comprising the amino acid sequence of SEQ ID NO: 1104; c. CDR-H3 comprising the amino acid sequence of SEQ ID NO: 1646; d. CDR-L1 comprising the amino acid sequence of SEQ ID NO: 833; e. CDR-L2 comprising the amino acid sequence of SEQ ID NO: 1375; and f. CDR-L3 comprising the amino acid sequence of SEQ ID NO: 1917. In one aspect, the present disclosure provides an antibody or antigen-binding fragment thereof comprising a CDR-H3 comprising the amino acid sequence of SEQ ID NO: 1646; and a CDR-L3 comprising the amino acid sequence of SEQ ID NO: 1917.

[0981] In one aspect, the present disclosure provides an antibody or antigen-binding fragment thereof comprising at least one, at least two, or all three VH CDR sequences selected from: a. CDR-H1 comprising the amino acid sequence of SEQ ID NO: 562; b. CDR-H2 comprising the amino acid sequence of SEQ ID NO: 1104; c. CDR-H3 comprising the amino acid sequence of SEQ ID NO: 1646; and a VL comprising the amino acid sequence of SEQ ID NO: 291.

[0982] In one aspect, the present disclosure provides an antibody or antigen-binding fragment thereof comprising at least one, at least two, or all three VL CDR sequences selected from: a. CDR-L1 comprising the amino acid sequence of SEQ ID NO: 833; b. CDR-L2 comprising the amino acid sequence of SEQ ID NO: 1375; c. CDR-L3 comprising the amino acid sequence of SEQ ID NO: 1917; and a VH comprising the amino acid sequence of SEQ ID NO: 20.

[0983] In one aspect, an antibody or antigen-binding fragment thereof is provided, wherein the antibody or antigen-binding fragment thereof comprises a heavy chain variable domain (VH) having at least 90%, 91%, 92%, 93%, 94%, 95%, 96%, 97%, 98%, 99%, or 100% sequence identity to the amino acid sequence SEQ ID NO: 20. In some embodiments, a VH sequence having at least 90%, 91%, 92%, 93%, 94%, 95%, 96%, 97%, 98%, or 99% identity contains substitutions (e.g., conservative substitutions), insertions, or deletions relative to the reference sequence, but an antibody or antigen-binding fragment thereof comprising that sequence retains the ability to bind to same antigen as of the parent (e.g., cancer associated antigen). In some embodiments, a total of 1 to 10 amino acids have been substituted, inserted and/or deleted in the amino acid sequence SEQ ID NO: 20. In some embodiments, substitutions, insertions, or deletions occur in regions outside the CDRs (e.g., in the FRs). Optionally, the antibody or antigen-binding fragment thereof comprises the VH sequence SEQ ID NO: 20, including one or more post-translational modifications of that sequence. In a particular embodiment, the VH comprises one, two or three CDRs selected from: a. CDR-H1, comprising the amino acid sequence SEQ ID NO: 562; b. CDR-H2, comprising the amino acid sequence SEQ ID NO: 1104; and c. CDR-H3, comprising the amino acid sequence SEQ ID NO: 1646.

[0984] In one aspect, an antibody or antigen-binding fragment thereof is provided, wherein the antibody or antigen-binding fragment thereof comprises a light chain variable domain (VL) having at least 90%, 91%, 92%, 93%, 94%, 95%, 96%, 97%, 98%, 99%, or 100% sequence identity to the amino acid sequence SEQ ID NO: 291. In some embodiments, a VL sequence having at least 90%, 91%, 92%, 93%, 94%, 95%, 96%, 97%, 98%, or 99% identity contains substitutions (e.g., conservative substitutions), insertions, or deletions relative to the reference sequence, but an antibody or antigen-binding fragment thereof comprising that sequence retains the ability to bind to same antigen as the parent (e.g., cancer associated antigen). In some embodiments, a total of 1 to 10 amino acids have been substituted, inserted and/or deleted in the amino acid sequence SEQ ID NO: 291. In some embodiments, the substitutions, insertions, or deletions occur in regions outside the CDRs (e.g., in the FRs). Optionally, the antibody or antigen-binding fragment thereof comprises the VL sequence SEQ ID NO: 291, including one or more post-translational modifications of that sequence. In a particular embodiment, the VL comprises one, two or three CDRs selected from: a. CDR-L1, comprising the amino acid sequence SEQ ID NO: 833; b. CDR-L2, comprising the amino acid sequence SEQ ID NO: 1375; and c. CDR-L3, comprising the amino acid sequence SEQ ID NO: 1917.

[0985] In one aspect, an antibody or antigen-binding fragment thereof is provided, wherein the antibody or antigen-binding fragment thereof comprises a VH as in any of the embodiments provided above, and a VL as in any of the embodiments provided above. In some embodiments, the antibody or antigen-binding fragment thereof comprises the VH amino acid sequence of SEQ ID NO: 20, and the VL amino acid sequence of SEQ ID NO: 291, optionally including post-translational modifications of those sequences.

### TBRE1008

[0986] In one aspect, the present disclosure provides an antibody or antigen-binding fragment thereof comprising at least one or both variable regions selected from: a. VH comprising the amino acid sequence of SEQ ID NO: 21 and b. VL comprising the amino acid sequence of SEQ ID NO: 292.

[0987] In one aspect, the present disclosure provides an antibody or antigen-binding fragment thereof comprising at least one, two, three, four, five, or six CDRs selected from: a. CDR-H1 comprising the amino acid sequence of SEQ ID NO: 563; b. CDR-H2 comprising the amino acid sequence of SEQ ID NO: 1105; c. CDR-H3 comprising the amino acid sequence of SEQ ID NO: 1647; d. CDR-L1 comprising the amino acid sequence of SEQ ID NO: 834; e. CDR-L2 comprising the amino acid sequence of SEQ ID NO: 1376; and f. CDR-L3 comprising the amino acid sequence of SEQ ID NO: 1918.

[0988] In one aspect, the present disclosure provides an antibody or antigen-binding fragment thereof comprising: a. CDR-H1 comprising the amino acid sequence of SEQ ID NO: 563; b. CDR-H2 comprising the amino acid sequence of SEQ ID NO: 1105; c. CDR-H3 comprising the amino acid sequence of SEQ ID NO: 1647; d. CDR-L1 comprising the amino acid sequence of SEQ ID NO: 834; e. CDR-L2 comprising the amino acid sequence of SEQ ID NO: 1376; and f. CDR-L3 comprising the amino acid sequence of SEQ ID NO: 1918. In one aspect, the present disclosure provides an antibody or antigen-binding fragment thereof comprising a CDR-H3 comprising the amino acid sequence of SEQ ID NO: 1647; and a CDR-L3 comprising the amino acid sequence of SEQ ID NO: 1918.

[0989] In one aspect, the present disclosure provides an antibody or antigen-binding fragment thereof comprising at least one, at least two, or all three VH CDR sequences selected from: a. CDR-H1 comprising the amino acid sequence of SEQ ID NO: 563; b. CDR-H2 comprising the amino acid sequence of SEQ ID NO: 1105; c. CDR-H3 comprising the amino acid sequence of SEQ ID NO: 1647; and a VL comprising the amino acid sequence of SEQ ID NO: 292.

[0990] In one aspect, the present disclosure provides an antibody or antigen-binding fragment thereof comprising at least one, at least two, or all three VL CDR sequences selected from: a. CDR-L1 comprising the amino acid sequence of SEQ ID NO: 834; b. CDR-L2 comprising the amino acid sequence of SEQ ID NO: 1376; c. CDR-L3 comprising the amino acid sequence of SEQ ID NO: 1918; and a VH comprising the amino acid sequence of SEQ ID NO: 21.

[0991] In one aspect, an antibody or antigen-binding fragment thereof is provided, wherein the antibody or antigen-binding fragment thereof comprises a heavy chain variable domain (VH) having at least 90%, 91%, 92%, 93%, 94%, 95%, 96%, 97%, 98%, 99%, or 100% sequence identity to the amino acid sequence SEQ ID NO: 21. In some embodiments, a VH sequence having at least 90%, 91%, 92%, 93%, 94%, 95%, 96%, 97%, 98%, or 99% identity contains substitutions (e.g., conservative substitutions), insertions, or deletions relative to the reference sequence, but an antibody or antigen-binding fragment thereof comprising that sequence retains the ability to bind to same antigen as of the parent (e.g., cancer associated antigen). In some embodiments, a total of 1 to 10 amino acids have been substituted, inserted and/or deleted in the amino acid sequence SEQ ID NO: 21. In some embodiments, substitutions, insertions, or deletions occur in regions outside the CDRs (e.g., in the FRs). Optionally, the antibody or antigen-binding fragment thereof comprises the VH sequence SEQ ID NO: 21, including one or more post-translational modifications of that sequence. In a particular embodiment, the VH comprises one, two or three CDRs selected from: a. CDR-H1, comprising the amino acid sequence SEQ ID NO: 563; b. CDR-H2, comprising the amino acid sequence SEQ ID NO: 1105; and c. CDR-H3, comprising the amino acid sequence SEQ ID NO: 1647.

[0992] In one aspect, an antibody or antigen-binding fragment thereof is provided, wherein the antibody or antigen-binding fragment thereof comprises a light chain variable domain (VL) having at least 90%, 91%, 92%, 93%, 94%, 95%, 96%, 97%, 98%, 99%, or 100% sequence identity to the amino acid sequence SEQ ID NO: 292. In some embodiments, a VL sequence having at least 90%, 91%, 92%, 93%, 94%, 95%, 96%, 97%, 98%, or 99% identity contains substitutions (e.g., conservative substitutions), insertions, or deletions relative to the reference sequence, but an antibody or antigen-binding fragment thereof comprising that sequence retains the ability to bind to same antigen as the parent (e.g., cancer associated antigen). In some embodiments, a total of 1 to 10 amino acids have been substituted, inserted and/or deleted in the amino acid sequence SEQ ID NO: 292. In some embodiments, the substitutions, insertions, or deletions occur in regions outside the CDRs (e.g., in the FRs). Optionally, the antibody or antigen-binding fragment thereof comprises the VL sequence SEQ ID NO: 292, including one or more post-translational modifications of that sequence. In a particular embodiment, the VL comprises one, two or three CDRs selected from: a. CDR-L1, comprising the amino acid sequence SEQ ID NO: 834; b. CDR-L2, comprising the amino acid sequence SEQ ID NO: 1376; and c. CDR-L3, comprising the amino acid sequence SEQ ID NO: 1918.

[0993] In one aspect, an antibody or antigen-binding fragment thereof is provided, wherein the antibody or antigen-binding fragment thereof comprises a VH as in any of the embodiments provided above, and a VL as in any of the embodiments provided above. In some embodiments, the antibody or antigen-binding fragment thereof comprises the VH amino acid sequence of SEQ ID NO: 21, and the VL amino acid sequence of SEQ ID NO: 292, optionally including post-translational modifications of those sequences.

### TBRE1009

[0994] In one aspect, the present disclosure provides an antibody or antigen-binding fragment thereof comprising at least one or both variable regions selected from: a. VH comprising the amino acid sequence of SEQ ID NO: 22 and b. VL comprising the amino acid sequence of SEQ ID NO: 293.

[0995] In one aspect, the present disclosure provides an antibody or antigen-binding fragment thereof comprising at least one, two, three, four, five, or six CDRs selected from: a. CDR-H1 comprising the amino acid sequence of SEQ ID NO: 564; b. CDR-H2 comprising the amino acid sequence of SEQ ID NO: 1106; c. CDR-H3 comprising the amino acid sequence of SEQ ID NO: 1648; d. CDR-L1 comprising the amino acid sequence of SEQ ID NO: 835; e. CDR-L2 comprising the amino acid sequence of SEQ ID NO: 1377; and f. CDR-L3 comprising the amino acid sequence of SEQ ID NO: 1919.

[0996] In one aspect, the present disclosure provides an antibody or antigen-binding fragment thereof comprising: a. CDR-H1 comprising the amino acid sequence of SEQ ID NO: 564; b. CDR-H2 comprising the amino acid sequence of SEQ ID NO: 1106; c. CDR-H3 comprising the amino acid sequence of SEQ ID NO: 1648; d. CDR-L1 comprising the amino acid sequence of SEQ ID NO: 835; e. CDR-L2 comprising the amino acid sequence of SEQ ID NO: 1377; and f. CDR-L3 comprising the amino acid sequence of SEQ ID NO: 1919. In one aspect, the present disclosure provides an antibody or antigen-binding fragment thereof comprising a CDR-H3 comprising the amino acid sequence of SEQ ID NO: 1648; and a CDR-L3 comprising the amino acid sequence of SEQ ID NO: 1919.

[0997] In one aspect, the present disclosure provides an antibody or antigen-binding fragment thereof comprising at least one, at least two, or all three VH CDR sequences selected from: a. CDR-H1 comprising the amino acid sequence of SEQ ID NO: 564; b. CDR-H2 comprising the amino acid sequence of SEQ ID NO: 1106; c. CDR-H3 comprising the amino acid sequence of SEQ ID NO: 1648; and a VL comprising the amino acid sequence of SEQ ID NO: 293.

[0998] In one aspect, the present disclosure provides an antibody or antigen-binding fragment thereof comprising at least one, at least two, or all three VL CDR sequences selected from: a. CDR-L1 comprising the amino acid sequence of SEQ ID NO: 835; b. CDR-L2 comprising the amino acid sequence of SEQ ID NO: 1377; c. CDR-L3 comprising the amino acid sequence of SEQ ID NO: 1919; and a VH comprising the amino acid sequence of SEQ ID NO: 22.

[0999] In one aspect, an antibody or antigen-binding fragment thereof is provided, wherein the antibody or antigen-binding fragment thereof comprises a heavy chain variable domain (VH) having at least 90%, 91%, 92%, 93%, 94%, 95%, 96%, 97%, 98%, 99%, or 100% sequence identity to the amino acid sequence SEQ ID NO: 22. In some embodiments, a VH sequence having at least 90%, 91%, 92%, 93%, 94%, 95%, 96%, 97%, 98%, or 99% identity contains substitutions (e.g., conservative substitutions), insertions, or deletions relative to the reference sequence, but an antibody or antigen-binding fragment thereof comprising that sequence retains the ability to bind to same antigen as of the parent (e.g., cancer associated antigen). In some embodiments, a total of 1 to 10 amino acids have been substituted, inserted and/or deleted in the amino acid sequence SEQ ID NO: 22. In some embodiments, substitutions, insertions, or deletions occur in regions outside the CDRs (e.g., in the FRs). Optionally, the antibody or antigen-binding fragment thereof comprises the VH sequence SEQ ID NO: 22, including one or more post-translational modifications of that sequence. In a particular embodiment, the VH comprises one, two or three CDRs selected from: a. CDR-H1, comprising the amino acid sequence SEQ ID NO: 564; b. CDR-H2, comprising the amino acid sequence SEQ ID NO: 1106; and c. CDR-H3, comprising the amino acid sequence SEQ ID NO: 1648.

[1000] In one aspect, an antibody or antigen-binding fragment thereof is provided, wherein the antibody or antigen-binding fragment thereof comprises a light chain variable domain (VL) having at least 90%, 91%, 92%, 93%, 94%, 95%, 96%, 97%, 98%, 99%, or 100% sequence identity to the amino acid sequence SEQ ID NO: 293. In some embodiments, a VL sequence having at least 90%, 91%, 92%, 93%, 94%, 95%, 96%, 97%, 98%, or 99% identity contains substitutions (e.g., conservative substitutions), insertions, or deletions relative to the reference sequence, but an antibody or antigen-binding fragment thereof comprising that sequence retains the ability to bind to same antigen as the parent (e.g., cancer associated antigen). In some embodiments, a total of 1 to 10 amino acids have been substituted, inserted and/or deleted in the amino acid sequence SEQ ID NO: 293. In some embodiments, the substitutions, insertions, or deletions occur in regions outside the CDRs (e.g., in the FRs). Optionally, the antibody or antigen-binding fragment thereof comprises the VL sequence SEQ ID NO: 293, including one or more post-translational modifications of that sequence. In a particular embodiment, the VL comprises one, two or three CDRs selected from: a. CDR-L1, comprising the amino acid sequence SEQ ID NO: 835; b. CDR-L2, comprising the amino acid sequence SEQ ID NO: 1377; and c. CDR-L3, comprising the amino acid sequence SEQ ID NO: 1919.

[1001] In one aspect, an antibody or antigen-binding fragment thereof is provided, wherein the antibody or antigen-binding fragment thereof comprises a VH as in any of the embodiments provided above, and a VL as in any of the embodiments provided above. In some embodiments, the antibody or antigen-binding fragment thereof comprises the VH amino acid sequence of SEQ ID NO: 22, and the VL amino acid sequence of SEQ ID NO: 293, optionally including post-translational modifications of those sequences.

### TBRE1010

[1002] In one aspect, the present disclosure provides an antibody or antigen-binding fragment thereof comprising at least one or both variable regions selected from: a. VH comprising the amino acid sequence of SEQ ID NO: 23 and b. VL comprising the amino acid sequence of SEQ ID NO: 294.

[1003] In one aspect, the present disclosure provides an antibody or antigen-binding fragment thereof comprising at least one, two, three, four, five, or six CDRs selected from: a. CDR-H1 comprising the amino acid sequence of SEQ ID NO: 565; b. CDR-H2 comprising the amino acid sequence of SEQ ID NO: 1107; c. CDR-H3 comprising the amino acid sequence of SEQ ID NO: 1649; d. CDR-L1 comprising the amino acid sequence of SEQ ID NO: 836; e. CDR-L2 comprising the amino acid sequence of SEQ ID NO: 1378; and f. CDR-L3 comprising the amino acid sequence of SEQ ID NO: 1920.

[1004] In one aspect, the present disclosure provides an antibody or antigen-binding fragment thereof comprising: a. CDR-H1 comprising the amino acid sequence of SEQ ID NO: 565; b. CDR-H2 comprising the amino acid sequence of SEQ ID NO: 1107; c. CDR-H3 comprising the amino acid sequence of SEQ ID NO: 1649; d. CDR-L1 comprising the amino acid sequence of SEQ ID NO: 836; e. CDR-L2 comprising the amino acid sequence of SEQ ID NO: 1378; and f. CDR-L3 comprising the amino acid sequence of SEQ ID NO: 1920. In one aspect, the present disclosure provides an antibody or antigen-binding fragment thereof comprising a CDR-H3 comprising the amino acid sequence of SEQ ID NO: 1649; and a CDR-L3 comprising the amino acid sequence of SEQ ID NO: 1920.

[1005] In one aspect, the present disclosure provides an antibody or antigen-binding fragment thereof comprising at least one, at least two, or all three VH CDR sequences selected from: a. CDR-H1 comprising the amino acid sequence of SEQ ID NO: 565; b. CDR-H2 comprising the amino acid sequence of SEQ ID NO: 1107; c. CDR-H3 comprising the amino acid sequence of SEQ ID NO: 1649; and a VL comprising the amino acid sequence of SEQ ID NO: 294.

[1006] In one aspect, the present disclosure provides an antibody or antigen-binding fragment thereof comprising at least one, at least two, or all three VL CDR sequences selected from: a. CDR-L1 comprising the amino acid sequence of SEQ ID NO: 836; b. CDR-L2 comprising the amino acid sequence of SEQ ID NO: 1378; c. CDR-L3 comprising the amino acid sequence of SEQ ID NO: 1920; and a VH comprising the amino acid sequence of SEQ ID NO: 23.

[1007] In one aspect, an antibody or antigen-binding fragment thereof is provided, wherein the antibody or antigen-binding fragment thereof comprises a heavy chain variable domain (VH) having at least 90%, 91%, 92%, 93%, 94%, 95%, 96%, 97%, 98%, 99%, or 100% sequence identity to the amino acid sequence SEQ ID NO: 23. In some embodiments, a VH sequence having at least 90%, 91%, 92%, 93%, 94%, 95%, 96%, 97%, 98%, or 99% identity contains substitutions (e.g., conservative substitutions), insertions, or deletions relative to the reference sequence, but an antibody or antigen-binding fragment thereof comprising that sequence retains the ability to bind to same antigen as of the parent (e.g., cancer associated antigen). In some embodiments, a total of 1 to 10 amino acids have been substituted, inserted and/or deleted in the amino acid sequence SEQ ID NO: 23. In some embodiments, substitutions, insertions, or deletions occur in regions outside the CDRs (e.g., in the FRs). Optionally, the antibody or antigen-binding fragment thereof comprises the VH sequence SEQ ID NO: 23, including one or more post-translational modifications of that sequence. In a particular embodiment, the VH comprises one, two or three CDRs selected from: a. CDR-H1, comprising the amino acid sequence SEQ ID NO: 565; b. CDR-H2, comprising the amino acid sequence SEQ ID NO: 1107; and a. CDR-H3, comprising the amino acid sequence SEQ ID NO: 1649.

[1008] In one aspect, an antibody or antigen-binding fragment thereof is provided, wherein the antibody or antigen-binding fragment thereof comprises a light chain variable domain (VL) having at least 90%, 91%, 92%, 93%, 94%, 95%, 96%, 97%, 98%, 99%, or 100% sequence identity to the amino acid sequence SEQ ID NO: 294. In some embodiments, a VL sequence having at least 90%, 91%, 92%, 93%, 94%, 95%, 96%, 97%, 98%, or 99% identity contains substitutions (e.g., conservative substitutions), insertions, or deletions relative to the reference sequence, but an antibody or antigen-binding fragment thereof comprising that sequence retains the ability to bind to same antigen as the parent (e.g., cancer associated antigen). In some embodiments, a total of 1 to 10 amino acids have been substituted, inserted and/or deleted in the amino acid sequence SEQ ID NO: 294. In some embodiments, the substitutions, insertions, or deletions occur in regions outside the CDRs (e.g., in the FRs). Optionally, the antibody or antigen-binding fragment thereof comprises the VL sequence SEQ ID NO: 294, including one or more post-translational modifications of that sequence. In a particular embodiment, the VL comprises one, two or three CDRs selected from: a. CDR-L1, comprising the amino acid sequence SEQ ID NO: 836; b. CDR-L2, comprising the amino acid sequence SEQ ID NO: 1378; and a. CDR-L3, comprising the amino acid sequence SEQ ID NO: 1920.

[1009] In one aspect, an antibody or antigen-binding fragment thereof is provided, wherein the antibody or antigen-binding fragment thereof comprises a VH as in any of the embodiments provided above, and a VL as in any of the embodiments provided above. In some embodiments, the antibody or antigen-binding fragment thereof comprises the VH amino acid sequence of SEQ ID NO: 23, and the VL amino acid sequence of SEQ ID NO: 294, optionally including post-translational modifications of those sequences.

### TBRE1011

[1010] In one aspect, the present disclosure provides an antibody or antigen-binding fragment thereof comprising at least one or both variable regions selected from: a. VH comprising the amino acid sequence of SEQ ID NO: 24 and a. VL comprising the amino acid sequence of SEQ ID NO: 295.

[1011] In one aspect, the present disclosure provides an antibody or antigen-binding fragment thereof comprising at least one, two, three, four, five, or six CDRs selected from: a. CDR-H1 comprising the amino acid sequence of SEQ ID NO: 566, b. CDR-H2 comprising the amino acid sequence of SEQ ID NO: 1108, c. CDR-H3 comprising the amino acid sequence of SEQ ID NO: 1650, d. CDR-L1 comprising the amino acid sequence of SEQ ID NO: 837, e. CDR-L2 comprising the amino acid sequence of SEQ ID NO: 1379, and f. CDR-L3 comprising the amino acid sequence of SEQ ID NO: 1921.

[1012] In one aspect, the present disclosure provides an antibody or antigen-binding fragment thereof comprising: a. CDR-H1 comprising the amino acid sequence of SEQ ID NO: 566, b. CDR-H2 comprising the amino acid sequence of SEQ ID NO: 1108, c. CDR-H3 comprising the amino acid sequence of SEQ ID NO: 1650, d. CDR-L1 comprising the amino acid sequence of SEQ ID NO: 837, e. CDR-L2 comprising the amino acid sequence of SEQ ID NO: 1379, and f. CDR-L3 comprising the amino acid sequence of SEQ ID NO: 1921. In one aspect, the present disclosure provides an antibody or antigen-binding fragment thereof comprising a CDR-H3 comprising the amino acid sequence of SEQ ID NO: 1650, and a CDR-L3 comprising the amino acid sequence of SEQ ID NO: 1921.

[1013] In one aspect, the present disclosure provides an antibody or antigen-binding fragment thereof comprising at least one, at least two, or all three VH CDR sequences selected from: a. CDR-H1 comprising the amino acid sequence of SEQ ID NO: 566, b. CDR-H2 comprising the amino acid sequence of SEQ ID NO: 1108, c. CDR-H3 comprising the amino acid sequence of SEQ ID NO: 1650, and a VL comprising the amino acid sequence of SEQ ID NO: 295.

[1014] In one aspect, the present disclosure provides an antibody or antigen-binding fragment thereof comprising at least one, at least two, or all three VL CDR sequences selected from: a. CDR-L1 comprising the amino acid sequence of SEQ ID NO: 837, b. CDR-L2 comprising the amino acid sequence of SEQ ID NO: 1379, c. CDR-L3 comprising the amino acid sequence of SEQ ID NO: 1921, and a VH comprising the amino acid sequence of SEQ ID NO: 24.

[1015] In one aspect, an antibody or antigen-binding fragment thereof is provided, wherein the antibody or antigen-binding fragment thereof comprises a heavy chain variable domain (VH) having at least 90%, 91%, 92%, 93%, 94%, 95%, 96%, 97%, 98%, 99%, or 100% sequence identity to the amino acid sequence SEQ ID NO: 24. In some embodiments, a VH sequence having at least 90%, 91%, 92%, 93%, 94%, 95%, 96%, 97%, 98%, or 99% identity contains substitutions (e.g., conservative substitutions), thereof comprising that sequence retains the ability to bind to same antigen as of the parent (e.g., cancer associated antigen). In some embodiments, a total of 1 to 10 amino acids have been substituted, inserted and/or deleted in the amino acid sequence SEQ ID NO: 24. In some embodiments, substitutions, insertions, or deletions occur in regions outside the CDRs (e.g., in the FRs). Optionally, the antibody or antigen-binding fragment thereof comprises the VH sequence SEQ ID NO: 24, including one or more post-translational modifications of that sequence. In a particular embodiment, the VH comprises one, two or three CDRs selected from: a. CDR-H1, comprising the amino acid sequence SEQ ID NO: 566, b. CDR-H2, comprising the amino acid sequence SEQ ID NO: 1108, and c. CDR-H3, comprising the amino acid sequence SEQ ID NO: 1650.

[1016] In one aspect, an antibody or antigen-binding fragment thereof is provided, wherein the antibody or antigen-binding fragment thereof comprises a light chain variable domain (VL) having at least 90%, 91%, 92%, 93%, 94%, 95%, 96%, 97%, 98%, 99%, or 100% sequence identity to the amino acid sequence SEQ ID NO: 295. In some embodiments, a VL sequence having at least 90%, 91%, 92%, 93%, 94%, 95%, 96%, 97%, 98%, or 99% identity contains substitutions (e.g., conservative substitutions), insertions, or deletions relative to the reference sequence, but an antibody or antigen-binding fragment thereof comprising that sequence retains the ability to bind to same antigen as the parent (e.g., cancer associated antigen). In some embodiments, a total of 1 to 10 amino acids have been substituted, inserted and/or deleted in the amino acid sequence SEQ ID NO: 295. In some embodiments, the substitutions, insertions, or deletions occur in regions outside the CDRs (e.g., in the FRs). Optionally, the antibody or antigen-binding fragment thereof comprises the VL sequence SEQ ID NO: 295, including one or more post-translational modifications of that sequence. In a particular embodiment, the VL comprises one, two or three CDRs selected from: a. CDR-L1, comprising the amino acid sequence SEQ ID NO: 837, b. CDR-L2, comprising the amino acid sequence SEQ ID NO: 1379, and c. CDR-L3, comprising the amino acid sequence SEQ ID NO: 1921.

[1017] In one aspect, an antibody or antigen-binding fragment thereof is provided, wherein the antibody or antigen-binding fragment thereof comprises a VH as in any of the embodiments provided above, and a VL as in any of the embodiments provided above. In some embodiments, the antibody or antigen-binding fragment thereof comprises the VH amino acid sequence of SEQ ID NO: 24, and the VL amino acid sequence of SEQ ID NO: 295, optionally including post-translational modifications of those sequences.

### TBRE1012

[1018] In one aspect, the present disclosure provides an antibody or antigen-binding fragment thereof comprising at least one or both variable regions selected from: a. VH comprising the amino acid sequence of SEQ ID NO: 25 and b. VL comprising the amino acid sequence of SEQ ID NO: 296.

[1019] In one aspect, the present disclosure provides an antibody or antigen-binding fragment thereof comprising at least one, two, three, four, five, or six CDRs selected from: a. CDR-H1 comprising the amino acid sequence of SEQ ID NO: 567, b. CDR-H2 comprising the amino acid sequence of SEQ ID NO: 1109, c. CDR-H3 comprising the amino acid sequence of SEQ ID NO: 1651, d. CDR-L1 comprising the amino acid sequence of SEQ ID NO: 838, e. CDR-L2 comprising the amino acid sequence of SEQ ID NO: 1380, and f. CDR-L3 comprising the amino acid sequence of SEQ ID NO: 1922.

[1020] In one aspect, the present disclosure provides an antibody or antigen-binding fragment thereof comprising: a. CDR-H1 comprising the amino acid sequence of SEQ ID NO: 567, b. CDR-H2 comprising the amino acid sequence of SEQ ID NO: 1109, c. CDR-H3 comprising the amino acid sequence of SEQ ID NO: 1651, d. CDR-L1 comprising the amino acid sequence of SEQ ID NO: 838, e. CDR-L2 comprising the amino acid sequence of SEQ ID NO: 1380, and f. CDR-L3 comprising the amino acid sequence of SEQ ID NO: 1922. In one aspect, the present disclosure provides an antibody or antigen-binding fragment thereof comprising a CDR-H3 comprising the amino acid sequence of SEQ ID NO: 1651, and a CDR-L3 comprising the amino acid sequence of SEQ ID NO: 1922.

[1021] In one aspect, the present disclosure provides an antibody or antigen-binding fragment thereof comprising at least one, at least two, or all three VH CDR sequences selected from: a. CDR-H1 comprising the amino acid sequence of SEQ ID NO: 567, b. CDR-H2 comprising the amino acid sequence of SEQ ID NO: 1109, c. CDR-H3 comprising the amino acid sequence of SEQ ID NO: 1651, and a VL comprising the amino acid sequence of SEQ ID NO: 296.

[1022] In one aspect, the present disclosure provides an antibody or antigen-binding fragment thereof comprising at least one, at least two, or all three VL CDR sequences selected from: a. CDR-L1 comprising the amino acid sequence of SEQ ID NO: 838, b. CDR-L2 comprising the amino acid sequence of SEQ ID NO: 1380, c. CDR-L3 comprising the amino acid sequence of SEQ ID NO: 1922, and a VH comprising the amino acid sequence of SEQ ID NO: 25.

[1023] In one aspect, an antibody or antigen-binding fragment thereof is provided, wherein the antibody or antigen-binding fragment thereof comprises a heavy chain variable domain (VH) having at least 90%, 91%, 92%, 93%, 94%, 95%, 96%, 97%, 98%, 99%, or 100% sequence identity to the amino acid sequence SEQ ID NO: 25. In some embodiments, a VH sequence having at least 90%, 91%, 92%, 93%, 94%, 95%, 96%, 97%, 98%, or 99% identity contains substitutions (e.g., conservative substitutions), insertions, or deletions relative to the reference sequence, but an antibody or antigen-binding fragment thereof comprising that sequence retains the ability to bind to same antigen as of the parent (e.g., cancer associated antigen). In some embodiments, a total of 1 to 10 amino acids have been substituted, inserted and/or deleted in the amino acid sequence SEQ ID NO: 25. In some embodiments, substitutions, insertions, or deletions occur in regions outside the CDRs (e.g., in the FRs). Optionally, the antibody or antigen-binding fragment thereof comprises the VH sequence SEQ ID NO: 25, including one or more post-translational modifications of that sequence. In a particular embodiment, the VH comprises one, two or three CDRs selected from: a. CDR-H1, comprising the amino acid sequence SEQ ID NO: 567, b. CDR-H2, comprising the amino acid sequence SEQ ID NO: 1109, and c. CDR-H3, comprising the amino acid sequence SEQ ID NO: 1651.

[1024] In one aspect, an antibody or antigen-binding fragment thereof is provided, wherein the antibody or antigen-binding fragment thereof comprises a light chain variable domain (VL) having at least 90%, 91%, 92%, 93%, 94%, 95%, 96%, 97%, 98%, 99%, or 100% sequence identity to the amino acid sequence SEQ ID NO: 296. In some embodiments, a VL sequence having at least 90%, 91%, 92%, 93%, 94%, 95%, 96%, 97%, 98%, or 99% identity contains substitutions (e.g., conservative substitutions), insertions, or deletions relative to the reference sequence, but an antibody or antigen-binding fragment thereof comprising that sequence retains the ability to bind to same antigen as the parent (e.g., cancer associated antigen). In some embodiments, a total of 1 to 10 amino acids have been substituted, inserted and/or deleted in the amino acid sequence SEQ ID NO: 296. In some embodiments, the substitutions, insertions, or deletions occur in regions outside the CDRs (e.g., in the FRs). Optionally, the antibody or antigen-binding fragment thereof comprises the VL sequence SEQ ID NO: 296, including one or more post-translational modifications of that sequence. In a particular embodiment, the VL comprises one, two or three CDRs selected from: a. CDR-L1, comprising the amino acid sequence SEQ ID NO: 838, b. CDR-L2, comprising the amino acid sequence SEQ ID NO: 1380, and c. CDR-L3, comprising the amino acid sequence SEQ ID NO: 1922.

[1025] In one aspect, an antibody or antigen-binding fragment thereof is provided, wherein the antibody or antigen-binding fragment thereof comprises a VH as in any of the embodiments provided above, and a VL as in any of the embodiments provided above. In some embodiments, the antibody or antigen-binding fragment thereof comprises the VH amino acid sequence of SEQ ID NO: 25, and the VL amino acid sequence of SEQ ID NO: 296, optionally including post-translational modifications of those sequences.

### TBRE1013

[1026] In one aspect, the present disclosure provides an antibody or antigen-binding fragment thereof comprising at least one or both variable regions selected from: a. VH comprising the amino acid sequence of SEQ ID NO: 26 and b. VL comprising the amino acid sequence of SEQ ID NO: 297.

[1027] In one aspect, the present disclosure provides an antibody or antigen-binding fragment thereof comprising at least one, two, three, four, five, or six CDRs selected from: a. CDR-H1 comprising the amino acid sequence of SEQ ID NO: 568, b. CDR-H2 comprising the amino acid sequence of SEQ ID NO: 1110, c. CDR-H3 comprising the amino acid sequence of SEQ ID NO: 1652, d. CDR-L1 comprising the amino acid sequence of SEQ ID NO: 839, e. CDR-L2 comprising the amino acid sequence of SEQ ID NO: 1381, and f. CDR-L3 comprising the amino acid sequence of SEQ ID NO: 1923.

[1028] In one aspect, the present disclosure provides an antibody or antigen-binding fragment thereof comprising: a. CDR-H1 comprising the amino acid sequence of SEQ ID NO: 568, b. CDR-H2 comprising the amino acid sequence of SEQ ID NO: 1110, c. CDR-H3 comprising the amino acid sequence of SEQ ID NO: 1652, d. CDR-L1 comprising the amino acid sequence of SEQ ID NO: 839, e. CDR-L2 comprising the amino acid sequence of SEQ ID NO: 1381, and f. CDR-L3 comprising the amino acid sequence of SEQ ID NO: 1923. In one aspect, the present disclosure provides an antibody or antigen-binding fragment thereof comprising a CDR-H3 comprising the amino acid sequence of SEQ ID NO: 1652, and a CDR-L3 comprising the amino acid sequence of SEQ ID NO: 1923.

[1029] In one aspect, the present disclosure provides an antibody or antigen-binding fragment thereof comprising at least one, at least two, or all three VH CDR sequences selected from: a. CDR-H1 comprising the amino acid sequence of SEQ ID NO: 568, b. CDR-H2 comprising the amino acid sequence of SEQ ID NO: 1110, c. CDR-H3 comprising the amino acid sequence of SEQ ID NO: 1652, and a VL comprising the amino acid sequence of SEQ ID NO: 297.

[1030] In one aspect, the present disclosure provides an antibody or antigen-binding fragment thereof comprising at least one, at least two, or all three VL CDR sequences selected from: a. CDR-L1 comprising the amino acid sequence of SEQ ID NO: 839, b. CDR-L2 comprising the amino acid sequence of SEQ ID NO: 1381, c. CDR-L3 comprising the amino acid sequence of SEQ ID NO: 1923, and a VH comprising the amino acid sequence of SEQ ID NO: 26.

[1031] In one aspect, an antibody or antigen-binding fragment thereof is provided, wherein the antibody or antigen-binding fragment thereof comprises a heavy chain variable domain (VH) having at least 90%, 91%, 92%, 93%, 94%, 95%, 96%, 97%, 98%, 99%, or 100% sequence identity to the amino acid sequence SEQ ID NO: 26. In some embodiments, a VH sequence having at least 90%, 91%, 92%, 93%, 94%, 95%, 96%, 97%, 98%, or 99% identity contains substitutions (e.g., conservative substitutions), insertions, or deletions relative to the reference sequence, but an antibody or antigen-binding fragment thereof comprising that sequence retains the ability to bind to same antigen as of the parent (e.g., cancer associated antigen). In some embodiments, a total of 1 to 10 amino acids have been substituted, inserted and/or deleted in the amino acid sequence SEQ ID NO: 26. In some embodiments, substitutions, insertions, or deletions occur in regions outside the CDRs (e.g., in the FRs). Optionally, the antibody or antigen-binding fragment thereof comprises the VH sequence SEQ ID NO: 26, including one or more post-translational modifications of that sequence. In a particular embodiment, the VH comprises one, two or three CDRs selected from: a. CDR-H1, comprising the amino acid sequence SEQ ID NO: 568, b. CDR-H2, comprising the amino acid sequence SEQ ID NO: 1110, and c. CDR-H3, comprising the amino acid sequence SEQ ID NO: 1652.

[1032] In one aspect, an antibody or antigen-binding fragment thereof is provided, wherein the antibody or antigen-binding fragment thereof comprises a light chain variable domain (VL) having at least 90%, 91%, 92%, 93%, 94%, 95%, 96%, 97%, 98%, 99%, or 100% sequence identity to the amino acid sequence SEQ ID NO: 297. In some embodiments, a VL sequence having at least 90%, 91%, 92%, 93%, 94%, 95%, 96%, 97%, 98%, or 99% identity contains substitutions (e.g., conservative substitutions), insertions, or deletions relative to the reference sequence, but an antibody or antigen-binding fragment thereof comprising that sequence retains the ability to bind to same antigen as the parent (e.g., cancer associated antigen). In some embodiments, a total of 1 to 10 amino acids have been substituted, inserted and/or deleted in the amino acid sequence SEQ ID NO: 297. In some embodiments, the substitutions, insertions, or deletions occur in regions outside the CDRs (e.g., in the FRs). Optionally, the antibody or antigen-binding fragment thereof comprises the VL sequence SEQ ID NO: 297, including one or more post-translational modifications of that sequence. In a particular embodiment, the VL comprises one, two or three CDRs selected from: a. CDR-L1, comprising the amino acid sequence SEQ ID NO: 839, b. CDR-L2, comprising the amino acid sequence SEQ ID NO: 1381, and c. CDR-L3, comprising the amino acid sequence SEQ ID NO: 1923.

[1033] In one aspect, an antibody or antigen-binding fragment thereof is provided, wherein the antibody or antigen-binding fragment thereof comprises a VH as in any of the embodiments provided above, and a VL as in any of the embodiments provided above. In some embodiments, the antibody or antigen-binding fragment thereof comprises the VH amino acid sequence of SEQ ID NO: 26, and the VL amino acid sequence of SEQ ID NO: 297, optionally including post-translational modifications of those sequences.

### TBRE1014

[1034] In one aspect, the present disclosure provides an antibody or antigen-binding fragment thereof comprising at least one or both variable regions selected from: a. VH comprising the amino acid sequence of SEQ ID NO: 27 and b. VL comprising the amino acid sequence of SEQ ID NO: 298.

[1035] In one aspect, the present disclosure provides an antibody or antigen-binding fragment thereof comprising at least one, two, three, four, five, or six CDRs selected from: a. CDR-H1 comprising the amino acid sequence of SEQ ID NO: 569, b. CDR-H2 comprising the amino acid sequence of SEQ ID NO: 1111, c. CDR-H3 comprising the amino acid sequence of SEQ ID NO: 1653, d. CDR-L1 comprising the amino acid sequence of SEQ ID NO: 840, e. CDR-L2 comprising the amino acid sequence of SEQ ID NO: 1382, and f. CDR-L3 comprising the amino acid sequence of SEQ ID NO: 1924.

[1036] In one aspect, the present disclosure provides an antibody or antigen-binding fragment thereof comprising: a. CDR-H1 comprising the amino acid sequence of SEQ ID NO: 569, b. CDR-H2 comprising the amino acid sequence of SEQ ID NO: 1111, c. CDR-H3 comprising the amino acid sequence of SEQ ID NO: 1653, d. CDR-L1 comprising the amino acid sequence of SEQ ID NO: 840, e. CDR-L2 comprising the amino acid sequence of SEQ ID NO: 1382, and f. CDR-L3 comprising the amino acid sequence of SEQ ID NO: 1924. In one aspect, the present disclosure provides an antibody or antigen-binding fragment thereof comprising a CDR-H3 comprising the amino acid sequence of SEQ ID NO: 1653, and a CDR-L3 comprising the amino acid sequence of SEQ ID NO: 1924.

[1037] In one aspect, the present disclosure provides an antibody or antigen-binding fragment thereof comprising at least one, at least two, or all three VH CDR sequences selected from: a. CDR-H1 comprising the amino acid sequence of SEQ ID NO: 569, b. CDR-H2 comprising the amino acid sequence of SEQ ID NO: 1111, c. CDR-H3 comprising the amino acid sequence of SEQ ID NO: 1653, and a VL comprising the amino acid sequence of SEQ ID NO: 298.

[1038] In one aspect, the present disclosure provides an antibody or antigen-binding fragment thereof comprising at least one, at least two, or all three VL CDR sequences selected from: a. CDR-L1 comprising the amino acid sequence of SEQ ID NO: 840, b. CDR-L2 comprising the amino acid sequence of SEQ ID NO: 1382, c. CDR-L3 comprising the amino acid sequence of SEQ ID NO: 1924, and a VH comprising the amino acid sequence of SEQ ID NO: 27.

[1039] In one aspect, an antibody or antigen-binding fragment thereof is provided, wherein the antibody or antigen-binding fragment thereof comprises a heavy chain variable domain (VH) having at least 90%, 91%, 92%, 93%, 94%, 95%, 96%, 97%, 98%, 99%, or 100% sequence identity to the amino acid sequence SEQ ID NO: 27. In some embodiments, a VH sequence having at least 90%, 91%, 92%, 93%, 94%, 95%, 96%, 97%, 98%, or 99% identity contains substitutions (e.g., conservative substitutions), thereof comprising that sequence retains the ability to bind to same antigen as of the parent (e.g., cancer associated antigen). In some embodiments, a total of 1 to 10 amino acids have been substituted, inserted and/or deleted in the amino acid sequence SEQ ID NO: 27. In some embodiments, substitutions, insertions, or deletions occur in regions outside the CDRs (e.g., in the FRs). Optionally, the antibody or antigen-binding fragment thereof comprises the VH sequence SEQ ID NO: 27, including one or more post-translational modifications of that sequence. In a particular embodiment, the VH comprises one, two or three CDRs selected from: a. CDR-H1, comprising the amino acid sequence SEQ ID NO: 569, b. CDR-H2, comprising the amino acid sequence SEQ ID NO: 1111, and c. CDR-H3, comprising the amino acid sequence SEQ ID NO: 1653.

[1040] In one aspect, an antibody or antigen-binding fragment thereof is provided, wherein the antibody or antigen-binding fragment thereof comprises a light chain variable domain (VL) having at least 90%, 91%, 92%, 93%, 94%, 95%, 96%, 97%, 98%, 99%, or 100% sequence identity to the amino acid sequence SEQ ID NO: 298. In some embodiments, a VL sequence having at least 90%, 91%, 92%, 93%, 94%, 95%, 96%, 97%, 98%, or 99% identity contains substitutions (e.g., conservative substitutions), insertions, or deletions relative to the reference sequence, but an antibody or antigen-binding fragment thereof comprising that sequence retains the ability to bind to same antigen as the parent (e.g., cancer associated antigen). In some embodiments, a total of 1 to 10 amino acids have been substituted, inserted and/or deleted in the amino acid sequence SEQ ID NO: 298. In some embodiments, the substitutions, insertions, or deletions occur in regions outside the CDRs (e.g., in the FRs). Optionally, the antibody or antigen-binding fragment thereof comprises the VL sequence SEQ ID NO: 298, including one or more post-translational modifications of that sequence. In a particular embodiment, the VL comprises one, two or three CDRs selected from: a. CDR-L1, comprising the amino acid sequence SEQ ID NO: 840, b. CDR-L2, comprising the amino acid sequence SEQ ID NO: 1382, and c. CDR-L3, comprising the amino acid sequence SEQ ID NO: 1924.

[1041] In one aspect, an antibody or antigen-binding fragment thereof is provided, wherein the antibody or antigen-binding fragment thereof comprises a VH as in any of the embodiments provided above, and a VL as in any of the embodiments provided above. In some embodiments, the antibody or antigen-binding fragment thereof comprises the VH amino acid sequence of SEQ ID NO: 27, and the VL amino acid sequence of SEQ ID NO: 298, optionally including post-translational modifications of those sequences.

### TBRE1015

[1042] In one aspect, the present disclosure provides an antibody or antigen-binding fragment thereof comprising at least one or both variable regions selected from: a. VH comprising the amino acid sequence of SEQ ID NO: 28 and b. VL comprising the amino acid sequence of SEQ ID NO: 299.

[1043] In one aspect, the present disclosure provides an antibody or antigen-binding fragment thereof comprising at least one, two, three, four, five, or six CDRs selected from: a. CDR-H1 comprising the amino acid sequence of SEQ ID NO: 570, b. CDR-H2 comprising the amino acid sequence of SEQ ID NO: 1112, c. CDR-H3 comprising the amino acid sequence of SEQ ID NO: 1654, d. CDR-L1 comprising the amino acid sequence of SEQ ID NO: 841, e. CDR-L2 comprising the amino acid sequence of SEQ ID NO: 1383, and f. CDR-L3 comprising the amino acid sequence of SEQ ID NO: 1925.

[1044] In one aspect, the present disclosure provides an antibody or antigen-binding fragment thereof comprising: a. CDR-H1 comprising the amino acid sequence of SEQ ID NO: 570, b. CDR-H2 comprising the amino acid sequence of SEQ ID NO: 1112, c. CDR-H3 comprising the amino acid sequence of SEQ ID NO: 1654, d. CDR-L1 comprising the amino acid sequence of SEQ ID NO: 841, e. CDR-L2 comprising the amino acid sequence of SEQ ID NO: 1383, and f. CDR-L3 comprising the amino acid sequence of SEQ ID NO: 1925. In one aspect, the present disclosure provides an antibody or antigen-binding fragment thereof comprising a CDR-H3 comprising the amino acid sequence of SEQ ID NO: 1654, and a CDR-L3 comprising the amino acid sequence of SEQ ID NO: 1925.

[1045] In one aspect, the present disclosure provides an antibody or antigen-binding fragment thereof comprising at least one, at least two, or all three VH CDR sequences selected from: a. CDR-H1 comprising the amino acid sequence of SEQ ID NO: 570, b. CDR-H2 comprising the amino acid sequence of SEQ ID NO: 1112, c. CDR-H3 comprising the amino acid sequence of SEQ ID NO: 1654, and a VL comprising the amino acid sequence of SEQ ID NO: 299.

[1046] In one aspect, the present disclosure provides an antibody or antigen-binding fragment thereof comprising at least one, at least two, or all three VL CDR sequences selected from: a. CDR-L1 comprising the amino acid sequence of SEQ ID NO: 841, b. CDR-L2 comprising the amino acid sequence of SEQ ID NO: 1383, c. CDR-L3 comprising the amino acid sequence of SEQ ID NO: 1925, and a VH comprising the amino acid sequence of SEQ ID NO: 28.

[1047] In one aspect, an antibody or antigen-binding fragment thereof is provided, wherein the antibody or antigen-binding fragment thereof comprises a heavy chain variable domain (VH) having at least 90%, 91%, 92%, 93%, 94%, 95%, 96%, 97%, 98%, 99%, or 100% sequence identity to the amino acid sequence SEQ ID NO: 28. In some embodiments, a VH sequence having at least 90%, 91%, 92%, 93%, 94%, 95%, 96%, 97%, 98%, or 99% identity contains substitutions (e.g., conservative substitutions), insertions, or deletions relative to the reference sequence, but an antibody or antigen-binding fragment thereof comprising that sequence retains the ability to bind to same antigen as of the parent (e.g., cancer associated antigen). In some embodiments, a total of 1 to 10 amino acids have been substituted, inserted and/or deleted in the amino acid sequence SEQ ID NO: 28. In some embodiments, substitutions, insertions, or deletions occur in regions outside the CDRs (e.g., in the FRs). Optionally, the antibody or antigen-binding fragment thereof comprises the VH sequence SEQ ID NO: 28, including one or more post-translational modifications of that sequence. In a particular embodiment, the VH comprises one, two or three CDRs selected from: a. CDR-H1, comprising the amino acid sequence SEQ ID NO: 570, b. CDR-H2, comprising the amino acid sequence SEQ ID NO: 1112, and c. CDR-H3, comprising the amino acid sequence SEQ ID NO: 1654.

[1048] In one aspect, an antibody or antigen-binding fragment thereof is provided, wherein the antibody or antigen-binding fragment thereof comprises a light chain variable domain (VL) having at least 90%, 91%, 92%, 93%, 94%, 95%, 96%, 97%, 98%, 99%, or 100% sequence identity to the amino acid sequence SEQ ID NO: 299. In some embodiments, a VL sequence having at least 90%, 91%, 92%, 93%, 94%, 95%, 96%, 97%, 98%, or 99% identity contains substitutions (e.g., conservative substitutions), insertions, or deletions relative to the reference sequence, but an antibody or antigen-binding fragment thereof comprising that sequence retains the ability to bind to same antigen as the parent (e.g., cancer associated antigen). In some embodiments, a total of 1 to 10 amino acids have been substituted, inserted and/or deleted in the amino acid sequence SEQ ID NO: 299. In some embodiments, the substitutions, insertions, or deletions occur in regions outside the CDRs (e.g., in the FRs). Optionally, the antibody or antigen-binding fragment thereof comprises the VL sequence SEQ ID NO: 299, including one or more post-translational modifications of that sequence. In a particular embodiment, the VL comprises one, two or three CDRs selected from: a. CDR-L1, comprising the amino acid sequence SEQ ID NO: 841, b. CDR-L2, comprising the amino acid sequence SEQ ID NO: 1383, and c. CDR-L3, comprising the amino acid sequence SEQ ID NO: 1925.

[1049] In one aspect, an antibody or antigen-binding fragment thereof is provided, wherein the antibody or antigen-binding fragment thereof comprises a VH as in any of the embodiments provided above, and a VL as in any of the embodiments provided above. In some embodiments, the antibody or antigen-binding fragment thereof comprises the VH amino acid sequence of SEQ ID NO: 28, and the VL amino acid sequence of SEQ ID NO: 299, optionally including post-translational modifications of those sequences.

### TBRE1016

[1050] In one aspect, the present disclosure provides an antibody or antigen-binding fragment thereof comprising at least one or both variable regions selected from: a. VH comprising the amino acid sequence of SEQ ID NO: 29 and b. VL comprising the amino acid sequence of SEQ ID NO: 300.

[1051] In one aspect, the present disclosure provides an antibody or antigen-binding fragment thereof comprising at least one, two, three, four, five, or six CDRs selected from: a. CDR-H1 comprising the amino acid sequence of SEQ ID NO: 571, b. CDR-H2 comprising the amino acid sequence of SEQ ID NO: 1113, c. CDR-H3 comprising the amino acid sequence of SEQ ID NO: 1655, d. CDR-L1 comprising the amino acid sequence of SEQ ID NO: 842, e. CDR-L2 comprising the amino acid sequence of SEQ ID NO: 1384, and f. CDR-L3 comprising the amino acid sequence of SEQ ID NO: 1926.

[1052] In one aspect, the present disclosure provides an antibody or antigen-binding fragment thereof comprising: a. CDR-H1 comprising the amino acid sequence of SEQ ID NO: 571, b. CDR-H2 comprising the amino acid sequence of SEQ ID NO: 1113, c. CDR-H3 comprising the amino acid sequence of SEQ ID NO: 1655, d. CDR-L1 comprising the amino acid sequence of SEQ ID NO: 842, e. CDR-L2 comprising the amino acid sequence of SEQ ID NO: 1384, and f. CDR-L3 comprising the amino acid sequence of SEQ ID NO: 1926. In one aspect, the present disclosure provides an antibody or antigen-binding fragment thereof comprising a CDR-H3 comprising the amino acid sequence of SEQ ID NO: 1655, and a CDR-L3 comprising the amino acid sequence of SEQ ID NO: 1926.

[1053] In one aspect, the present disclosure provides an antibody or antigen-binding fragment thereof comprising at least one, at least two, or all three VH CDR sequences selected from: a. CDR-H1 comprising the amino acid sequence of SEQ ID NO: 571, b. CDR-H2 comprising the amino acid sequence of SEQ ID NO: 1113, c. CDR-H3 comprising the amino acid sequence of SEQ ID NO: 1655, and a VL comprising the amino acid sequence of SEQ ID NO: 300.

[1054] In one aspect, the present disclosure provides an antibody or antigen-binding fragment thereof comprising at least one, at least two, or all three VL CDR sequences selected from: a. CDR-L1 comprising the amino acid sequence of SEQ ID NO: 842, b. CDR-L2 comprising the amino acid sequence of SEQ ID NO: 1384, c. CDR-L3 comprising the amino acid sequence of SEQ ID NO: 1926, and a VH comprising the amino acid sequence of SEQ ID NO: 29.

[1055] In one aspect, an antibody or antigen-binding fragment thereof is provided, wherein the antibody or antigen-binding fragment thereof comprises a heavy chain variable domain (VH) having at least 90%, 91%, 92%, 93%, 94%, 95%, 96%, 97%, 98%, 99%, or 100% sequence identity to the amino acid sequence SEQ ID NO: 29. In some embodiments, a VH sequence having at least 90%, 91%, 92%, 93%, 94%, 95%, 96%, 97%, 98%, or 99% identity contains substitutions (e.g., conservative substitutions), insertions, or deletions relative to the reference sequence, but an antibody or antigen-binding fragment thereof comprising that sequence retains the ability to bind to same antigen as of the parent (e.g., cancer associated antigen). In some embodiments, a total of 1 to 10 amino acids have been substituted, inserted and/or deleted in the amino acid sequence SEQ ID NO: 29. In some embodiments, substitutions, insertions, or deletions occur in regions outside the CDRs (e.g., in the FRs). Optionally, the antibody or antigen-binding fragment thereof comprises the VH sequence SEQ ID NO: 29, including one or more post-translational modifications of that sequence. In a particular embodiment, the VH comprises one, two or three CDRs selected from: a. CDR-H1, comprising the amino acid sequence SEQ ID NO: 571, b. CDR-H2, comprising the amino acid sequence SEQ ID NO: 1113, and c. CDR-H3, comprising the amino acid sequence SEQ ID NO: 1655.

[1056] In one aspect, an antibody or antigen-binding fragment thereof is provided, wherein the antibody or antigen-binding fragment thereof comprises a light chain variable domain (VL) having at least 90%, 91%, 92%, 93%, 94%, 95%, 96%, 97%, 98%, 99%, or 100% sequence identity to the amino acid sequence SEQ ID NO: 300. In some embodiments, a VL sequence having at least 90%, 91%, 92%, 93%, 94%, 95%, 96%, 97%, 98%, or 99% identity contains substitutions (e.g., conservative substitutions), insertions, or deletions relative to the reference sequence, but an antibody or antigen-binding fragment thereof comprising that sequence retains the ability to bind to same antigen as the parent (e.g., cancer associated antigen). In some embodiments, a total of 1 to 10 amino acids have been substituted, inserted and/or deleted in the amino acid sequence SEQ ID NO: 300. In some embodiments, the substitutions, insertions, or deletions occur in regions outside the CDRs (e.g., in the FRs). Optionally, the antibody or antigen-binding fragment thereof comprises the VL sequence SEQ ID NO: 300, including one or more post-translational modifications of that sequence. In a particular embodiment, the VL comprises one, two or three CDRs selected from: a. CDR-L1, comprising the amino acid sequence SEQ ID NO: 842, b. CDR-L2, comprising the amino acid sequence SEQ ID NO: 1384, and c. CDR-L3, comprising the amino acid sequence SEQ ID NO: 1926.

[1057] In one aspect, an antibody or antigen-binding fragment thereof is provided, wherein the antibody or antigen-binding fragment thereof comprises a VH as in any of the embodiments provided above, and a VL as in any of the embodiments provided above. In some embodiments, the antibody or antigen-binding fragment thereof comprises the VH amino acid sequence of SEQ ID NO: 29, and the VL amino acid sequence of SEQ ID NO: 300, optionally including post-translational modifications of those sequences.

### TBRE1017

[1058] In one aspect, the present disclosure provides an antibody or antigen-binding fragment thereof comprising at least one or both variable regions selected from: a. VH comprising the amino acid sequence of SEQ ID NO: 30 and b. VL comprising the amino acid sequence of SEQ ID NO: 301.

[1059] In one aspect, the present disclosure provides an antibody or antigen-binding fragment thereof comprising at least one, two, three, four, five, or six CDRs selected from: a. CDR-H1 comprising the amino acid sequence of SEQ ID NO: 572, b. CDR-H2 comprising the amino acid sequence of SEQ ID NO: 1114, c. CDR-H3 comprising the amino acid sequence of SEQ ID NO: 1656, d. CDR-L1 comprising the amino acid sequence of SEQ ID NO: 843, e. CDR-L2 comprising the amino acid sequence of SEQ ID NO: 1385, and f. CDR-L3 comprising the amino acid sequence of SEQ ID NO: 1927.

[1060] In one aspect, the present disclosure provides an antibody or antigen-binding fragment thereof comprising: a. CDR-H1 comprising the amino acid sequence of SEQ ID NO: 572, b. CDR-H2 comprising the amino acid sequence of SEQ ID NO: 1114, c. CDR-H3 comprising the amino acid sequence of SEQ ID NO: 1656, d. CDR-L1 comprising the amino acid sequence of SEQ ID NO: 843, e. CDR-L2 comprising the amino acid sequence of SEQ ID NO: 1385, and f. CDR-L3 comprising the amino acid sequence of SEQ ID NO: 1927. In one aspect, the present disclosure provides an antibody or antigen-binding fragment thereof comprising a CDR-H3 comprising the amino acid sequence of SEQ ID NO: 1656, and a CDR-L3 comprising the amino acid sequence of SEQ ID NO: 1927.

[1061] In one aspect, the present disclosure provides an antibody or antigen-binding fragment thereof comprising at least one, at least two, or all three VH CDR sequences selected from: a. CDR-H1 comprising the amino acid sequence of SEQ ID NO: 572, b. CDR-H2 comprising the amino acid sequence of SEQ ID NO: 1114, c. CDR-H3 comprising the amino acid sequence of SEQ ID NO: 1656, and a VL comprising the amino acid sequence of SEQ ID NO: 301.

[1062] In one aspect, the present disclosure provides an antibody or antigen-binding fragment thereof comprising at least one, at least two, or all three VL CDR sequences selected from: a. CDR-L1 comprising the amino acid sequence of SEQ ID NO: 843, b. CDR-L2 comprising the amino acid sequence of SEQ ID NO: 1385, c. CDR-L3 comprising the amino acid sequence of SEQ ID NO: 1927, and a VH comprising the amino acid sequence of SEQ ID NO: 30.

[1063] In one aspect, an antibody or antigen-binding fragment thereof is provided, wherein the antibody or antigen-binding fragment thereof comprises a heavy chain variable domain (VH) having at least 90%, 91%, 92%, 93%, 94%, 95%, 96%, 97%, 98%, 99%, or 100% sequence identity to the amino acid sequence SEQ ID NO: 30. In some embodiments, a VH sequence having at least 90%, 91%, 92%, 93%, 94%, 95%, 96%, 97%, 98%, or 99% identity contains substitutions (e.g., conservative substitutions), thereof comprising that sequence retains the ability to bind to same antigen as of the parent (e.g., cancer associated antigen). In some embodiments, a total of 1 to 10 amino acids have been substituted, inserted and/or deleted in the amino acid sequence SEQ ID NO: 30. In some embodiments, substitutions, insertions, or deletions occur in regions outside the CDRs (e.g., in the FRs). Optionally, the antibody or antigen-binding fragment thereof comprises the VH sequence SEQ ID NO: 30, including one or more post-translational modifications of that sequence. In a particular embodiment, the VH comprises one, two or three CDRs selected from: a. CDR-H1, comprising the amino acid sequence SEQ ID NO: 572, b. CDR-H2, comprising the amino acid sequence SEQ ID NO: 1114, and c. CDR-H3, comprising the amino acid sequence SEQ ID NO: 1656.

[1064] In one aspect, an antibody or antigen-binding fragment thereof is provided, wherein the antibody or antigen-binding fragment thereof comprises a light chain variable domain (VL) having at least 90%, 91%, 92%, 93%, 94%, 95%, 96%, 97%, 98%, 99%, or 100% sequence identity to the amino acid sequence SEQ ID NO: 301. In some embodiments, a VL sequence having at least 90%, 91%, 92%, 93%, 94%, 95%, 96%, 97%, 98%, or 99% identity contains substitutions (e.g., conservative substitutions), insertions, or deletions relative to the reference sequence, but an antibody or antigen-binding fragment thereof comprising that sequence retains the ability to bind to same antigen as the parent (e.g., cancer associated antigen). In some embodiments, a total of 1 to 10 amino acids have been substituted, inserted and/or deleted in the amino acid sequence SEQ ID NO: 301. In some embodiments, the substitutions, insertions, or deletions occur in regions outside the CDRs (e.g., in the FRs). Optionally, the antibody or antigen-binding fragment thereof comprises the VL sequence SEQ ID NO: 301, including one or more post-translational modifications of that sequence. In a particular embodiment, the VL comprises one, two or three CDRs selected from: a. CDR-L1, comprising the amino acid sequence SEQ ID NO: 843, b. CDR-L2, comprising the amino acid sequence SEQ ID NO: 1385, and c. CDR-L3, comprising the amino acid sequence SEQ ID NO: 1927.

[1065] In one aspect, an antibody or antigen-binding fragment thereof is provided, wherein the antibody or antigen-binding fragment thereof comprises a VH as in any of the embodiments provided above, and a VL as in any of the embodiments provided above. In some embodiments, the antibody or antigen-binding fragment thereof comprises the VH amino acid sequence of SEQ ID NO: 30, and the VL amino acid sequence of SEQ ID NO: 301, optionally including post-translational modifications of those sequences.

### TBRE1018

[1066] In one aspect, the present disclosure provides an antibody or antigen-binding fragment thereof comprising at least one or both variable regions selected from: a. VH comprising the amino acid sequence of SEQ ID NO: 31 and b. VL comprising the amino acid sequence of SEQ ID NO: 302.

[1067] In one aspect, the present disclosure provides an antibody or antigen-binding fragment thereof comprising at least one, two, three, four, five, or six CDRs selected from: a. CDR-H1 comprising the amino acid sequence of SEQ ID NO: 573, b. CDR-H2 comprising the amino acid sequence of SEQ ID NO: 1115, c. CDR-H3 comprising the amino acid sequence of SEQ ID NO: 1657, d. CDR-L1 comprising the amino acid sequence of SEQ ID NO: 844, e. CDR-L2 comprising the amino acid sequence of SEQ ID NO: 1386, and f. CDR-L3 comprising the amino acid sequence of SEQ ID NO: 1928.

[1068] In one aspect, the present disclosure provides an antibody or antigen-binding fragment thereof comprising: a. CDR-H1 comprising the amino acid sequence of SEQ ID NO: 573, b. CDR-H2 comprising the amino acid sequence of SEQ ID NO: 1115, c. CDR-H3 comprising the amino acid sequence of SEQ ID NO: 1657, d. CDR-L1 comprising the amino acid sequence of SEQ ID NO: 844, e. CDR-L2 comprising the amino acid sequence of SEQ ID NO: 1386, and f. CDR-L3 comprising the amino acid sequence of SEQ ID NO: 1928. In one aspect, the present disclosure provides an antibody or antigen-binding fragment thereof comprising a CDR-H3 comprising the amino acid sequence of SEQ ID NO: 1657, and a CDR-L3 comprising the amino acid sequence of SEQ ID NO: 1928.

[1069] In one aspect, the present disclosure provides an antibody or antigen-binding fragment thereof comprising at least one, at least two, or all three VH CDR sequences selected from: a. CDR-H1 comprising the amino acid sequence of SEQ ID NO: 573, b. CDR-H2 comprising the amino acid sequence of SEQ ID NO: 1115, c. CDR-H3 comprising the amino acid sequence of SEQ ID NO: 1657, and a VL comprising the amino acid sequence of SEQ ID NO: 302.

[1070] In one aspect, the present disclosure provides an antibody or antigen-binding fragment thereof comprising at least one, at least two, or all three VL CDR sequences selected from: a. CDR-L1 comprising the amino acid sequence of SEQ ID NO: 844, b. CDR-L2 comprising the amino acid sequence of SEQ ID NO: 1386, c. CDR-L3 comprising the amino acid sequence of SEQ ID NO: 1928, and a VH comprising the amino acid sequence of SEQ ID NO: 31.

[1071] In one aspect, an antibody or antigen-binding fragment thereof is provided, wherein the antibody or antigen-binding fragment thereof comprises a heavy chain variable domain (VH) having at least 90%, 91%, 92%, 93%, 94%, 95%, 96%, 97%, 98%, 99%, or 100% sequence identity to the amino acid sequence SEQ ID NO: 31. In some embodiments, a VH sequence having at least 90%, 91%, 92%, 93%, 94%, 95%, 96%, 97%, 98%, or 99% identity contains substitutions (e.g., conservative substitutions), insertions, or deletions relative to the reference sequence, but an antibody or antigen-binding fragment thereof comprising that sequence retains the ability to bind to same antigen as of the parent (e.g., cancer associated antigen). In some embodiments, a total of 1 to 10 amino acids have been substituted, inserted and/or deleted in the amino acid sequence SEQ ID NO: 31. In some embodiments, substitutions, insertions, or deletions occur in regions outside the CDRs (e.g., in the FRs). Optionally, the antibody or antigen-binding fragment thereof comprises the VH sequence SEQ ID NO: 31, including one or more post-translational modifications of that sequence. In a particular embodiment, the VH comprises one, two or three CDRs selected from: a. CDR-H1, comprising the amino acid sequence SEQ ID NO: 573, b. CDR-H2, comprising the amino acid sequence SEQ ID NO: 1115, and c. CDR-H3, comprising the amino acid sequence SEQ ID NO: 1657.

[1072] In one aspect, an antibody or antigen-binding fragment thereof is provided, wherein the antibody or antigen-binding fragment thereof comprises a light chain variable domain (VL) having at least 90%, 91%, 92%, 93%, 94%, 95%, 96%, 97%, 98%, 99%, or 100% sequence identity to the amino acid sequence SEQ ID NO: 302. In some embodiments, a VL sequence having at least 90%, 91%, 92%, 93%, 94%, 95%, 96%, 97%, 98%, or 99% identity contains substitutions (e.g., conservative substitutions), insertions, or deletions relative to the reference sequence, but an antibody or antigen-binding fragment thereof comprising that sequence retains the ability to bind to same antigen as the parent (e.g., cancer associated antigen). In some embodiments, a total of 1 to 10 amino acids have been substituted, inserted and/or deleted in the amino acid sequence SEQ ID NO: 302. In some embodiments, the substitutions, insertions, or deletions occur in regions outside the CDRs (e.g., in the FRs). Optionally, the antibody or antigen-binding fragment thereof comprises the VL sequence SEQ ID NO: 302, including one or more post-translational modifications of that sequence. In a particular embodiment, the VL comprises one, two or three CDRs selected from: a. CDR-L1, comprising the amino acid sequence SEQ ID NO: 844, b. CDR-L2, comprising the amino acid sequence SEQ ID NO: 1386, and c. CDR-L3, comprising the amino acid sequence SEQ ID NO: 1928.

[1073] In one aspect, an antibody or antigen-binding fragment thereof is provided, wherein the antibody or antigen-binding fragment thereof comprises a VH as in any of the embodiments provided above, and a VL as in any of the embodiments provided above. In some embodiments, the antibody or antigen-binding fragment thereof comprises the VH amino acid sequence of SEQ ID NO: 31, and the VL amino acid sequence of SEQ ID NO: 302, optionally including post-translational modifications of those sequences.

### TBRE1019

[1074] In one aspect, the present disclosure provides an antibody or antigen-binding fragment thereof comprising at least one or both variable regions selected from: a. VH comprising the amino acid sequence of SEQ ID NO: 32 and b. VL comprising the amino acid sequence of SEQ ID NO: 303.

[1075] In one aspect, the present disclosure provides an antibody or antigen-binding fragment thereof comprising at least one, two, three, four, five, or six CDRs selected from: a. CDR-H1 comprising the amino acid sequence of SEQ ID NO: 574, b. CDR-H2 comprising the amino acid sequence of SEQ ID NO: 1116, c. CDR-H3 comprising the amino acid sequence of SEQ ID NO: 1658, d. CDR-L1 comprising the amino acid sequence of SEQ ID NO: 845, e. CDR-L2 comprising the amino acid sequence of SEQ ID NO: 1387, and f. CDR-L3 comprising the amino acid sequence of SEQ ID NO: 1929.

[1076] In one aspect, the present disclosure provides an antibody or antigen-binding fragment thereof comprising: a. CDR-H1 comprising the amino acid sequence of SEQ ID NO: 574, b. CDR-H2 comprising the amino acid sequence of SEQ ID NO: 1116, c. CDR-H3 comprising the amino acid sequence of SEQ ID NO: 1658, d. CDR-L1 comprising the amino acid sequence of SEQ ID NO: 845, e. CDR-L2 comprising the amino acid sequence of SEQ ID NO: 1387, and f. CDR-L3 comprising the amino acid sequence of SEQ ID NO: 1929. In one aspect, the present disclosure provides an antibody or antigen-binding fragment thereof comprising a CDR-H3 comprising the amino acid sequence of SEQ ID NO: 1658, and a CDR-L3 comprising the amino acid sequence of SEQ ID NO: 1929.

[1077] In one aspect, the present disclosure provides an antibody or antigen-binding fragment thereof comprising at least one, at least two, or all three VH CDR sequences selected from: a. CDR-H1 comprising the amino acid sequence of SEQ ID NO: 574, b. CDR-H2 comprising the amino acid sequence of SEQ ID NO: 1116, c. CDR-H3 comprising the amino acid sequence of SEQ ID NO: 1658, and a VL comprising the amino acid sequence of SEQ ID NO: 303.

[1078] In one aspect, the present disclosure provides an antibody or antigen-binding fragment thereof comprising at least one, at least two, or all three VL CDR sequences selected from: a. CDR-L1 comprising the amino acid sequence of SEQ ID NO: 845, b. CDR-L2 comprising the amino acid sequence of SEQ ID NO: 1387, c. CDR-L3 comprising the amino acid sequence of SEQ ID NO: 1929, and a VH comprising the amino acid sequence of SEQ ID NO: 32.

[1079] In one aspect, an antibody or antigen-binding fragment thereof is provided, wherein the antibody or antigen-binding fragment thereof comprises a heavy chain variable domain (VH) having at least 90%, 91%, 92%, 93%, 94%, 95%, 96%, 97%, 98%, 99%, or 100% sequence identity to the amino acid sequence SEQ ID NO: 32. In some embodiments, a VH sequence having at least 90%, 91%, 92%, 93%, 94%, 95%, 96%, 97%, 98%, or 99% identity contains substitutions (e.g., conservative substitutions), insertions, or deletions relative to the reference sequence, but an antibody or antigen-binding fragment thereof comprising that sequence retains the ability to bind to same antigen as of the parent (e.g., cancer associated antigen). In some embodiments, a total of 1 to 10 amino acids have been substituted, inserted and/or deleted in the amino acid sequence SEQ ID NO: 32. In some embodiments, substitutions, insertions, or deletions occur in regions outside the CDRs (e.g., in the FRs). Optionally, the antibody or antigen-binding fragment thereof comprises the VH sequence SEQ ID NO: 32, including one or more post-translational modifications of that sequence. In a particular embodiment, the VH comprises one, two or three CDRs selected from: a. CDR-H1, comprising the amino acid sequence SEQ ID NO: 574, b. CDR-H2, comprising the amino acid sequence SEQ ID NO: 1116, and c. CDR-H3, comprising the amino acid sequence SEQ ID NO: 1658.

[1080] In one aspect, an antibody or antigen-binding fragment thereof is provided, wherein the antibody or antigen-binding fragment thereof comprises a light chain variable domain (VL) having at least 90%, 91%, 92%, 93%, 94%, 95%, 96%, 97%, 98%, 99%, or 100% sequence identity to the amino acid sequence SEQ ID NO: 303. In some embodiments, a VL sequence having at least 90%, 91%, 92%, 93%, 94%, 95%, 96%, 97%, 98%, or 99% identity contains substitutions (e.g., conservative substitutions), insertions, or deletions relative to the reference sequence, but an antibody or antigen-binding fragment thereof comprising that sequence retains the ability to bind to same antigen as the parent (e.g., cancer associated antigen). In some embodiments, a total of 1 to 10 amino acids have been substituted, inserted and/or deleted in the amino acid sequence SEQ ID NO: 303. In some embodiments, the substitutions, insertions, or deletions occur in regions outside the CDRs (e.g., in the FRs). Optionally, the antibody or antigen-binding fragment thereof comprises the VL sequence SEQ ID NO: 303, including one or more post-translational modifications of that sequence. In a particular embodiment, the VL comprises one, two or three CDRs selected from: a. CDR-L1, comprising the amino acid sequence SEQ ID NO: 845, b. CDR-L2, comprising the amino acid sequence SEQ ID NO: 1387, and c. CDR-L3, comprising the amino acid sequence SEQ ID NO: 1929.

[1081] In one aspect, an antibody or antigen-binding fragment thereof is provided, wherein the antibody or antigen-binding fragment thereof comprises a VH as in any of the embodiments provided above, and a VL as in any of the embodiments provided above. In some embodiments, the antibody or antigen-binding fragment thereof comprises the VH amino acid sequence of SEQ ID NO: 32, and the VL amino acid sequence of SEQ ID NO: 303, optionally including post-translational modifications of those sequences.

### TBRE1020

[1082] In one aspect, the present disclosure provides an antibody or antigen-binding fragment thereof comprising at least one or both variable regions selected from: a. VH comprising the amino acid sequence of SEQ ID NO: 33 and b. VL comprising the amino acid sequence of SEQ ID NO: 304.

[1083] In one aspect, the present disclosure provides an antibody or antigen-binding fragment thereof comprising at least one, two, three, four, five, or six CDRs selected from: a. CDR-H1 comprising the amino acid sequence of SEQ ID NO: 575, b. CDR-H2 comprising the amino acid sequence of SEQ ID NO: 1117, c. CDR-H3 comprising the amino acid sequence of SEQ ID NO: 1659, d. CDR-L1 comprising the amino acid sequence of SEQ ID NO: 846, e. CDR-L2 comprising the amino acid sequence of SEQ ID NO: 1388, and f. CDR-L3 comprising the amino acid sequence of SEQ ID NO: 1930.

[1084] In one aspect, the present disclosure provides an antibody or antigen-binding fragment thereof comprising: a. CDR-H1 comprising the amino acid sequence of SEQ ID NO: 575, b. CDR-H2 comprising the amino acid sequence of SEQ ID NO: 1117, c. CDR-H3 comprising the amino acid sequence of SEQ ID NO: 1659, d. CDR-L1 comprising the amino acid sequence of SEQ ID NO: 846, e. CDR-L2 comprising the amino acid sequence of SEQ ID NO: 1388, and f. CDR-L3 comprising the amino acid sequence of SEQ ID NO: 1930. In one aspect, the present disclosure provides an antibody or antigen-binding fragment thereof comprising a CDR-H3 comprising the amino acid sequence of SEQ ID NO: 1659, and a CDR-L3 comprising the amino acid sequence of SEQ ID NO: 1930.

[1085] In one aspect, the present disclosure provides an antibody or antigen-binding fragment thereof comprising at least one, at least two, or all three VH CDR sequences selected from: a. CDR-H1 comprising the amino acid sequence of SEQ ID NO: 575, b. CDR-H2 comprising the amino acid sequence of SEQ ID NO: 1117, c. CDR-H3 comprising the amino acid sequence of SEQ ID NO: 1659, and a VL comprising the amino acid sequence of SEQ ID NO: 304.

[1086] In one aspect, the present disclosure provides an antibody or antigen-binding fragment thereof comprising at least one, at least two, or all three VL CDR sequences selected from: a. CDR-L1 comprising the amino acid sequence of SEQ ID NO: 846, b. CDR-L2 comprising the amino acid sequence of SEQ ID NO: 1388, c. CDR-L3 comprising the amino acid sequence of SEQ ID NO: 1930, and a VH comprising the amino acid sequence of SEQ ID NO: 33.

[1087] In one aspect, an antibody or antigen-binding fragment thereof is provided, wherein the antibody or antigen-binding fragment thereof comprises a heavy chain variable domain (VH) having at least 90%, 91%, 92%, 93%, 94%, 95%, 96%, 97%, 98%, 99%, or 100% sequence identity to the amino acid sequence SEQ ID NO: 33. In some embodiments, a VH sequence having at least 90%, 91%, 92%, 93%, 94%, 95%, 96%, 97%, 98%, or 99% identity contains substitutions (e.g., conservative substitutions), thereof comprising that sequence retains the ability to bind to same antigen as of the parent (e.g., cancer associated antigen). In some embodiments, a total of 1 to 10 amino acids have been substituted, inserted and/or deleted in the amino acid sequence SEQ ID NO: 33. In some embodiments, substitutions, insertions, or deletions occur in regions outside the CDRs (e.g., in the FRs). Optionally, the antibody or antigen-binding fragment thereof comprises the VH sequence SEQ ID NO: 33, including one or more post-translational modifications of that sequence. In a particular embodiment, the VH comprises one, two or three CDRs selected from: a. CDR-H1, comprising the amino acid sequence SEQ ID NO: 575, b. CDR-H2, comprising the amino acid sequence SEQ ID NO: 1117, and c. CDR-H3, comprising the amino acid sequence SEQ ID NO: 1659.

[1088] In one aspect, an antibody or antigen-binding fragment thereof is provided, wherein the antibody or antigen-binding fragment thereof comprises a light chain variable domain (VL) having at least 90%, 91%, 92%, 93%, 94%, 95%, 96%, 97%, 98%, 99%, or 100% sequence identity to the amino acid sequence SEQ ID NO: 304. In some embodiments, a VL sequence having at least 90%, 91%, 92%, 93%, 94%, 95%, 96%, 97%, 98%, or 99% identity contains substitutions (e.g., conservative substitutions), insertions, or deletions relative to the reference sequence, but an antibody or antigen-binding fragment thereof comprising that sequence retains the ability to bind to same antigen as the parent (e.g., cancer associated antigen). In some embodiments, a total of 1 to 10 amino acids have been substituted, inserted and/or deleted in the amino acid sequence SEQ ID NO: 304. In some embodiments, the substitutions, insertions, or deletions occur in regions outside the CDRs (e.g., in the FRs). Optionally, the antibody or antigen-binding fragment thereof comprises the VL sequence SEQ ID NO: 304, including one or more post-translational modifications of that sequence. In a particular embodiment, the VL comprises one, two or three CDRs selected from: a. CDR-L1, comprising the amino acid sequence SEQ ID NO: 846, b. CDR-L2, comprising the amino acid sequence SEQ ID NO: 1388, and c. CDR-L3, comprising the amino acid sequence SEQ ID NO: 1930.

[1089] In one aspect, an antibody or antigen-binding fragment thereof is provided, wherein the antibody or antigen-binding fragment thereof comprises a VH as in any of the embodiments provided above, and a VL as in any of the embodiments provided above. In some embodiments, the antibody or antigen-binding fragment thereof comprises the VH amino acid sequence of SEQ ID NO: 33, and the VL amino acid sequence of SEQ ID NO: 304, optionally including post-translational modifications of those sequences.

### TBRE1021

[1090] In one aspect, the present disclosure provides an antibody or antigen-binding fragment thereof comprising at least one or both variable regions selected from: a. VH comprising the amino acid sequence of SEQ ID NO: 34 and b. VL comprising the amino acid sequence of SEQ ID NO: 305.

[1091] In one aspect, the present disclosure provides an antibody or antigen-binding fragment thereof comprising at least one, two, three, four, five, or six CDRs selected from: a. CDR-H1 comprising the amino acid sequence of SEQ ID NO: 576, b. CDR-H2 comprising the amino acid sequence of SEQ ID NO: 1118, c. CDR-H3 comprising the amino acid sequence of SEQ ID NO: 1660, d. CDR-L1 comprising the amino acid sequence of SEQ ID NO: 847, e. CDR-L2 comprising the amino acid sequence of SEQ ID NO: 1389, and f. CDR-L3 comprising the amino acid sequence of SEQ ID NO: 1931.

[1092] In one aspect, the present disclosure provides an antibody or antigen-binding fragment thereof comprising: a. CDR-H1 comprising the amino acid sequence of SEQ ID NO: 576, b. CDR-H2 comprising the amino acid sequence of SEQ ID NO: 1118, c. CDR-H3 comprising the amino acid sequence of SEQ ID NO: 1660, d. CDR-L1 comprising the amino acid sequence of SEQ ID NO: 847, e. CDR-L2 comprising the amino acid sequence of SEQ ID NO: 1389, and f. CDR-L3 comprising the amino acid sequence of SEQ ID NO: 1931. In one aspect, the present disclosure provides an antibody or antigen-binding fragment thereof comprising a CDR-H3 comprising the amino acid sequence of SEQ ID NO: 1660, and a CDR-L3 comprising the amino acid sequence of SEQ ID NO: 1931.

[1093] In one aspect, the present disclosure provides an antibody or antigen-binding fragment thereof comprising at least one, at least two, or all three VH CDR sequences selected from: a. CDR-H1 comprising the amino acid sequence of SEQ ID NO: 576, b. CDR-H2 comprising the amino acid sequence of SEQ ID NO: 1118, c. CDR-H3 comprising the amino acid sequence of SEQ ID NO: 1660, and a VL comprising the amino acid sequence of SEQ ID NO: 305.

[1094] In one aspect, the present disclosure provides an antibody or antigen-binding fragment thereof comprising at least one, at least two, or all three VL CDR sequences selected from: a. CDR-L1 comprising the amino acid sequence of SEQ ID NO: 847, b. CDR-L2 comprising the amino acid sequence of SEQ ID NO: 1389, c. CDR-L3 comprising the amino acid sequence of SEQ ID NO: 1931, and a VH comprising the amino acid sequence of SEQ ID NO: 34.

[1095] In one aspect, an antibody or antigen-binding fragment thereof is provided, wherein the antibody or antigen-binding fragment thereof comprises a heavy chain variable domain (VH) having at least 90%, 91%, 92%, 93%, 94%, 95%, 96%, 97%, 98%, 99%, or 100% sequence identity to the amino acid sequence SEQ ID NO: 34. In some embodiments, a VH sequence having at least 90%, 91%, 92%, 93%, 94%, 95%, 96%, 97%, 98%, or 99% identity contains substitutions (e.g., conservative substitutions), insertions, or deletions relative to the reference sequence, but an antibody or antigen-binding fragment thereof comprising that sequence retains the ability to bind to same antigen as of the parent (e.g., cancer associated antigen). In some embodiments, a total of 1 to 10 amino acids have been substituted, inserted and/or deleted in the amino acid sequence SEQ ID NO: 34. In some embodiments, substitutions, insertions, or deletions occur in regions outside the CDRs (e.g., in the FRs). Optionally, the antibody or antigen-binding fragment thereof comprises the VH sequence SEQ ID NO: 34, including one or more post-translational modifications of that sequence. In a particular embodiment, the VH comprises one, two or three CDRs selected from: a. CDR-H1, comprising the amino acid sequence SEQ ID NO: 576, b. CDR-H2, comprising the amino acid sequence SEQ ID NO: 1118, and c. CDR-H3, comprising the amino acid sequence SEQ ID NO: 1660.

[1096] In one aspect, an antibody or antigen-binding fragment thereof is provided, wherein the antibody or antigen-binding fragment thereof comprises a light chain variable domain (VL) having at least 90%, 91%, 92%, 93%, 94%, 95%, 96%, 97%, 98%, 99%, or 100% sequence identity to the amino acid sequence SEQ ID NO: 305. In some embodiments, a VL sequence having at least 90%, 91%, 92%, 93%, 94%, 95%, 96%, 97%, 98%, or 99% identity contains substitutions (e.g., conservative substitutions), insertions, or deletions relative to the reference sequence, but an antibody or antigen-binding fragment thereof comprising that sequence retains the ability to bind to same antigen as the parent (e.g., cancer associated antigen). In some embodiments, a total of 1 to 10 amino acids have been substituted, inserted and/or deleted in the amino acid sequence SEQ ID NO: 305. In some embodiments, the substitutions, insertions, or deletions occur in regions outside the CDRs (e.g., in the FRs). Optionally, the antibody or antigen-binding fragment thereof comprises the VL sequence SEQ ID NO: 305, including one or more post-translational modifications of that sequence. In a particular embodiment, the VL comprises one, two or three CDRs selected from: a. CDR-L1, comprising the amino acid sequence SEQ ID NO: 847, b. CDR-L2, comprising the amino acid sequence SEQ ID NO: 1389, and c. CDR-L3, comprising the amino acid sequence SEQ ID NO: 1931.

[1097] In one aspect, an antibody or antigen-binding fragment thereof is provided, wherein the antibody or antigen-binding fragment thereof comprises a VH as in any of the embodiments provided above, and a VL as in any of the embodiments provided above. In some embodiments, the antibody or antigen-binding fragment thereof comprises the VH amino acid sequence of SEQ ID NO: 34, and the VL amino acid sequence of SEQ ID NO: 305, optionally including post-translational modifications of those sequences.

### TBRE1022

[1098] In one aspect, the present disclosure provides an antibody or antigen-binding fragment thereof comprising at least one or both variable regions selected from: a. VH comprising the amino acid sequence of SEQ ID NO: 35 and b. VL comprising the amino acid sequence of SEQ ID NO: 306.

[1099] In one aspect, the present disclosure provides an antibody or antigen-binding fragment thereof comprising at least one, two, three, four, five, or six CDRs selected from: a. CDR-H1 comprising the amino acid sequence of SEQ ID NO: 577, b. CDR-H2 comprising the amino acid sequence of SEQ ID NO: 1119, c. CDR-H3 comprising the amino acid sequence of SEQ ID NO: 1661, d. CDR-L1 comprising the amino acid sequence of SEQ ID NO: 848, e. CDR-L2 comprising the amino acid sequence of SEQ ID NO: 1390, and f. CDR-L3 comprising the amino acid sequence of SEQ ID NO: 1932.

[1100] In one aspect, the present disclosure provides an antibody or antigen-binding fragment thereof comprising: a. CDR-H1 comprising the amino acid sequence of SEQ ID NO: 577, b. CDR-H2 comprising the amino acid sequence of SEQ ID NO: 1119, c. CDR-H3 comprising the amino acid sequence of SEQ ID NO: 1661, d. CDR-L1 comprising the amino acid sequence of SEQ ID NO: 848, e. CDR-L2 comprising the amino acid sequence of SEQ ID NO: 1390, and f. CDR-L3 comprising the amino acid sequence of SEQ ID NO: 1932. In one aspect, the present disclosure provides an antibody or antigen-binding fragment thereof comprising a CDR-H3 comprising the amino acid sequence of SEQ ID NO: 1661, and a CDR-L3 comprising the amino acid sequence of SEQ ID NO: 1932.

[1101] In one aspect, the present disclosure provides an antibody or antigen-binding fragment thereof comprising at least one, at least two, or all three VH CDR sequences selected from: a. CDR-H1 comprising the amino acid sequence of SEQ ID NO: 577, b. CDR-H2 comprising the amino acid sequence of SEQ ID NO: 1119, c. CDR-H3 comprising the amino acid sequence of SEQ ID NO: 1661, and a. VL comprising the amino acid sequence of SEQ ID NO: 306.

[1102] In one aspect, the present disclosure provides an antibody or antigen-binding fragment thereof comprising at least one, at least two, or all three VL CDR sequences selected from: a. CDR-L1 comprising the amino acid sequence of SEQ ID NO: 848, b. CDR-L2 comprising the amino acid sequence of SEQ ID NO: 1390, c. CDR-L3 comprising the amino acid sequence of SEQ ID NO: 1932, and a VH comprising the amino acid sequence of SEQ ID NO: 35.

[1103] In one aspect, an antibody or antigen-binding fragment thereof is provided, wherein the antibody or antigen-binding fragment thereof comprises a heavy chain variable domain (VH) having at least 90%, 91%, 92%, 93%, 94%, 95%, 96%, 97%, 98%, 99%, or 100% sequence identity to the amino acid sequence SEQ ID NO: 35. In some embodiments, a VH sequence having at least 90%, 91%, 92%, 93%, 94%, 95%, 96%, 97%, 98%, or 99% identity contains substitutions (e.g., conservative substitutions), insertions, or deletions relative to the reference sequence, but an antibody or antigen-binding fragment thereof comprising that sequence retains the ability to bind to same antigen as of the parent (e.g., cancer associated antigen). In some embodiments, a total of 1 to 10 amino acids have been substituted, inserted and/or deleted in the amino acid sequence SEQ ID NO: 35. In some embodiments, substitutions, insertions, or deletions occur in regions outside the CDRs (e.g., in the FRs). Optionally, the antibody or antigen-binding fragment thereof comprises the VH sequence SEQ ID NO: 35, including one or more post-translational modifications of that sequence. In a particular embodiment, the VH comprises one, two or three CDRs selected from: a. CDR-H1, comprising the amino acid sequence SEQ ID NO: 577, b. CDR-H2, comprising the amino acid sequence SEQ ID NO: 1119, and c. CDR-H3, comprising the amino acid sequence SEQ ID NO: 1661.

[1104] In one aspect, an antibody or antigen-binding fragment thereof is provided, wherein the antibody or antigen-binding fragment thereof comprises a light chain variable domain (VL) having at least 90%, 91%, 92%, 93%, 94%, 95%, 96%, 97%, 98%, 99%, or 100% sequence identity to the amino acid sequence SEQ ID NO: 306. In some embodiments, a VL sequence having at least 90%, 91%, 92%, 93%, 94%, 95%, 96%, 97%, 98%, or 99% identity contains substitutions (e.g., conservative substitutions), insertions, or deletions relative to the reference sequence, but an antibody or antigen-binding fragment thereof comprising that sequence retains the ability to bind to same antigen as the parent (e.g., cancer associated antigen). In some embodiments, a total of 1 to 10 amino acids have been substituted, inserted and/or deleted in the amino acid sequence SEQ ID NO: 306. In some embodiments, the substitutions, insertions, or deletions occur in regions outside the CDRs (e.g., in the FRs). Optionally, the antibody or antigen-binding fragment thereof comprises the VL sequence SEQ ID NO: 306, including one or more post-translational modifications of that sequence. In a particular embodiment, the VL comprises one, two or three CDRs selected from: a. CDR-L1, comprising the amino acid sequence SEQ ID NO: 848, b. CDR-L2, comprising the amino acid sequence SEQ ID NO: 1390, and c. CDR-L3, comprising the amino acid sequence SEQ ID NO: 1932.

[1105] In one aspect, an antibody or antigen-binding fragment thereof is provided, wherein the antibody or antigen-binding fragment thereof comprises a VH as in any of the embodiments provided above, and a VL as in any of the embodiments provided above. In some embodiments, the antibody or antigen-binding fragment thereof comprises the VH amino acid sequence of SEQ ID NO: 35, and the VL amino acid sequence of SEQ ID NO: 306, optionally including post-translational modifications of those sequences.

### TBRE1023

[1106] In one aspect, the present disclosure provides an antibody or antigen-binding fragment thereof comprising at least one or both variable regions selected from: a. VH comprising the amino acid sequence of SEQ ID NO: 36 and b. VL comprising the amino acid sequence of SEQ ID NO: 307.

[1107] In one aspect, the present disclosure provides an antibody or antigen-binding fragment thereof comprising at least one, two, three, four, five, or six CDRs selected from: a. CDR-H1 comprising the amino acid sequence of SEQ ID NO: 578, b. CDR-H2 comprising the amino acid sequence of SEQ ID NO: 1120, c. CDR-H3 comprising the amino acid sequence of SEQ ID NO: 1662, d. CDR-L1 comprising the amino acid sequence of SEQ ID NO: 849, e. CDR-L2 comprising the amino acid sequence of SEQ ID NO: 1391, and f. CDR-L3 comprising the amino acid sequence of SEQ ID NO: 1933.

[1108] In one aspect, the present disclosure provides an antibody or antigen-binding fragment thereof comprising: a. CDR-H1 comprising the amino acid sequence of SEQ ID NO: 578, b. CDR-H2 comprising the amino acid sequence of SEQ ID NO: 1120, c. CDR-H3 comprising the amino acid sequence of SEQ ID NO: 1662, d. CDR-L1 comprising the amino acid sequence of SEQ ID NO: 849, e. CDR-L2 comprising the amino acid sequence of SEQ ID NO: 1391, and f. CDR-L3 comprising the amino acid sequence of SEQ ID NO: 1933. In one aspect, the present disclosure provides an antibody or antigen-binding fragment thereof comprising a CDR-H3 comprising the amino acid sequence of SEQ ID NO: 1662, and a CDR-L3 comprising the amino acid sequence of SEQ ID NO: 1933.

[1109] In one aspect, the present disclosure provides an antibody or antigen-binding fragment thereof comprising at least one, at least two, or all three VH CDR sequences selected from: a. CDR-H1 comprising the amino acid sequence of SEQ ID NO: 578, b. CDR-H2 comprising the amino acid sequence of SEQ ID NO: 1120, c. CDR-H3 comprising the amino acid sequence of SEQ ID NO: 1662, and a VL comprising the amino acid sequence of SEQ ID NO: 307.

[1110] In one aspect, the present disclosure provides an antibody or antigen-binding fragment thereof comprising at least one, at least two, or all three VL CDR sequences selected from: a. CDR-L1 comprising the amino acid sequence of SEQ ID NO: 849, b. CDR-L2 comprising the amino acid sequence of SEQ ID NO: 1391, c. CDR-L3 comprising the amino acid sequence of SEQ ID NO: 1933, and a VH comprising the amino acid sequence of SEQ ID NO: 36.

[1111] In one aspect, an antibody or antigen-binding fragment thereof is provided, wherein the antibody or antigen-binding fragment thereof comprises a heavy chain variable domain (VH) having at least 90%, 91%, 92%, 93%, 94%, 95%, 96%, 97%, 98%, 99%, or 100% sequence identity to the amino acid sequence SEQ ID NO: 36. In some embodiments, a VH sequence having at least 90%, 91%, 92%, 93%, 94%, 95%, 96%, 97%, 98%, or 99% identity contains substitutions (e.g., conservative substitutions), thereof comprising that sequence retains the ability to bind to same antigen as of the parent (e.g., cancer associated antigen). In some embodiments, a total of 1 to 10 amino acids have been substituted, inserted and/or deleted in the amino acid sequence SEQ ID NO: 36. In some embodiments, substitutions, insertions, or deletions occur in regions outside the CDRs (e.g., in the FRs). Optionally, the antibody or antigen-binding fragment thereof comprises the VH sequence SEQ ID NO: 36, including one or more post-translational modifications of that sequence. In a particular embodiment, the VH comprises one, two or three CDRs selected from: a. CDR-H1, comprising the amino acid sequence SEQ ID NO: 578, b. CDR-H2, comprising the amino acid sequence SEQ ID NO: 1120, and c. CDR-H3, comprising the amino acid sequence SEQ ID NO: 1662.

[1112] In one aspect, an antibody or antigen-binding fragment thereof is provided, wherein the antibody or antigen-binding fragment thereof comprises a light chain variable domain (VL) having at least 90%, 91%, 92%, 93%, 94%, 95%, 96%, 97%, 98%, 99%, or 100% sequence identity to the amino acid sequence SEQ ID NO: 307. In some embodiments, a VL sequence having at least 90%, 91%, 92%, 93%, 94%, 95%, 96%, 97%, 98%, or 99% identity contains substitutions (e.g., conservative substitutions), insertions, or deletions relative to the reference sequence, but an antibody or antigen-binding fragment thereof comprising that sequence retains the ability to bind to same antigen as the parent (e.g., cancer associated antigen). In some embodiments, a total of 1 to 10 amino acids have been substituted, inserted and/or deleted in the amino acid sequence SEQ ID NO: 307. In some embodiments, the substitutions, insertions, or deletions occur in regions outside the CDRs (e.g., in the FRs). Optionally, the antibody or antigen-binding fragment thereof comprises the VL sequence SEQ ID NO: 307, including one or more post-translational modifications of that sequence. In a particular embodiment, the VL comprises one, two or three CDRs selected from: a. CDR-L1, comprising the amino acid sequence SEQ ID NO: 849, b. CDR-L2, comprising the amino acid sequence SEQ ID NO: 1391, and c. CDR-L3, comprising the amino acid sequence SEQ ID NO: 1933.

[1113] In one aspect, an antibody or antigen-binding fragment thereof is provided, wherein the antibody or antigen-binding fragment thereof comprises a VH as in any of the embodiments provided above, and a VL as in any of the embodiments provided above. In some embodiments, the antibody or antigen-binding fragment thereof comprises the VH amino acid sequence of SEQ ID NO: 36, and the VL amino acid sequence of SEQ ID NO: 307, optionally including post-translational modifications of those sequences.

### TBRE1024

[1114] In one aspect, the present disclosure provides an antibody or antigen-binding fragment thereof comprising at least one or both variable regions selected from: a. VH comprising the amino acid sequence of SEQ ID NO: 37 and b. VL comprising the amino acid sequence of SEQ ID NO: 308.

[1115] In one aspect, the present disclosure provides an antibody or antigen-binding fragment thereof comprising at least one, two, three, four, five, or six CDRs selected from: a. CDR-H1 comprising the amino acid sequence of SEQ ID NO: 579, b. CDR-H2 comprising the amino acid sequence of SEQ ID NO: 1121, c. CDR-H3 comprising the amino acid sequence of SEQ ID NO: 1663, d. CDR-L1 comprising the amino acid sequence of SEQ ID NO: 850, e. CDR-L2 comprising the amino acid sequence of SEQ ID NO: 1392, and f. CDR-L3 comprising the amino acid sequence of SEQ ID NO: 1934.

[1116] In one aspect, the present disclosure provides an antibody or antigen-binding fragment thereof comprising: a. CDR-H1 comprising the amino acid sequence of SEQ ID NO: 579, b. CDR-H2 comprising the amino acid sequence of SEQ ID NO: 1121, c. CDR-H3 comprising the amino acid sequence of SEQ ID NO: 1663, d. CDR-L1 comprising the amino acid sequence of SEQ ID NO: 850, e. CDR-L2 comprising the amino acid sequence of SEQ ID NO: 1392, and f. CDR-L3 comprising the amino acid sequence of SEQ ID NO: 1934. In one aspect, the present disclosure provides an antibody or antigen-binding fragment thereof comprising a CDR-H3 comprising the amino acid sequence of SEQ ID NO: 1663, and a CDR-L3 comprising the amino acid sequence of SEQ ID NO: 1934.

[1117] In one aspect, the present disclosure provides an antibody or antigen-binding fragment thereof comprising at least one, at least two, or all three VH CDR sequences selected from: a. CDR-H1 comprising the amino acid sequence of SEQ ID NO: 579, b. CDR-H2 comprising the amino acid sequence of SEQ ID NO: 1121, c. CDR-H3 comprising the amino acid sequence of SEQ ID NO: 1663, and a VL comprising the amino acid sequence of SEQ ID NO: 308.

[1118] In one aspect, the present disclosure provides an antibody or antigen-binding fragment thereof comprising at least one, at least two, or all three VL CDR sequences selected from: a. CDR-L1 comprising the amino acid sequence of SEQ ID NO: 850, b. CDR-L2 comprising the amino acid sequence of SEQ ID NO: 1392, c. CDR-L3 comprising the amino acid sequence of SEQ ID NO: 1934, and a VH comprising the amino acid sequence of SEQ ID NO: 37.

[1119] In one aspect, an antibody or antigen-binding fragment thereof is provided, wherein the antibody or antigen-binding fragment thereof comprises a heavy chain variable domain (VH) having at least 90%, 91%, 92%, 93%, 94%, 95%, 96%, 97%, 98%, 99%, or 100% sequence identity to the amino acid sequence SEQ ID NO: 37. In some embodiments, a VH sequence having at least 90%, 91%, 92%, 93%, 94%, 95%, 96%, 97%, 98%, or 99% identity contains substitutions (e.g., conservative substitutions), insertions, or deletions relative to the reference sequence, but an antibody or antigen-binding fragment thereof comprising that sequence retains the ability to bind to same antigen as of the parent (e.g., cancer associated antigen). In some embodiments, a total of 1 to 10 amino acids have been substituted, inserted and/or deleted in the amino acid sequence SEQ ID NO: 37. In some embodiments, substitutions, insertions, or deletions occur in regions outside the CDRs (e.g., in the FRs). Optionally, the antibody or antigen-binding fragment thereof comprises the VH sequence SEQ ID NO: 37, including one or more post-translational modifications of that sequence. In a particular embodiment, the VH comprises one, two or three CDRs selected from: a. CDR-H1, comprising the amino acid sequence SEQ ID NO: 579, b. CDR-H2, comprising the amino acid sequence SEQ ID NO: 1121, and c. CDR-H3, comprising the amino acid sequence SEQ ID NO: 1663.

[1120] In one aspect, an antibody or antigen-binding fragment thereof is provided, wherein the antibody or antigen-binding fragment thereof comprises a light chain variable domain (VL) having at least 90%, 91%, 92%, 93%, 94%, 95%, 96%, 97%, 98%, 99%, or 100% sequence identity to the amino acid sequence SEQ ID NO: 308. In some embodiments, a VL sequence having at least 90%, 91%, 92%, 93%, 94%, 95%, 96%, 97%, 98%, or 99% identity contains substitutions (e.g., conservative substitutions), insertions, or deletions relative to the reference sequence, but an antibody or antigen-binding fragment thereof comprising that sequence retains the ability to bind to same antigen as the parent (e.g., cancer associated antigen). In some embodiments, a total of 1 to 10 amino acids have been substituted, inserted and/or deleted in the amino acid sequence SEQ ID NO: 308. In some embodiments, the substitutions, insertions, or deletions occur in regions outside the CDRs (e.g., in the FRs). Optionally, the antibody or antigen-binding fragment thereof comprises the VL sequence SEQ ID NO: 308, including one or more post-translational modifications of that sequence. In a particular embodiment, the VL comprises one, two or three CDRs selected from: a. CDR-L1, comprising the amino acid sequence SEQ ID NO: 850, b. CDR-L2, comprising the amino acid sequence SEQ ID NO: 1392, and c. CDR-L3, comprising the amino acid sequence SEQ ID NO: 1934.

[1121] In one aspect, an antibody or antigen-binding fragment thereof is provided, wherein the antibody or antigen-binding fragment thereof comprises a VH as in any of the embodiments provided above, and a VL as in any of the embodiments provided above. In some embodiments, the antibody or antigen-binding fragment thereof comprises the VH amino acid sequence of SEQ ID NO: 37, and the VL amino acid sequence of SEQ ID NO: 308, optionally including post-translational modifications of those sequences.

### TBRE1025

[1122] In one aspect, the present disclosure provides an antibody or antigen-binding fragment thereof comprising at least one or both variable regions selected from: a. VH comprising the amino acid sequence of SEQ ID NO: 38 and b. VL comprising the amino acid sequence of SEQ ID NO: 309.

[1123] In one aspect, the present disclosure provides an antibody or antigen-binding fragment thereof comprising at least one, two, three, four, five, or six CDRs selected from: a. CDR-H1 comprising the amino acid sequence of SEQ ID NO: 580, b. CDR-H2 comprising the amino acid sequence of SEQ ID NO: 1122, c. CDR-H3 comprising the amino acid sequence of SEQ ID NO: 1664, d. CDR-L1 comprising the amino acid sequence of SEQ ID NO: 851, e. CDR-L2 comprising the amino acid sequence of SEQ ID NO: 1393, and f. CDR-L3 comprising the amino acid sequence of SEQ ID NO: 1935.

[1124] In one aspect, the present disclosure provides an antibody or antigen-binding fragment thereof comprising: a. CDR-H1 comprising the amino acid sequence of SEQ ID NO: 580, b. CDR-H2 comprising the amino acid sequence of SEQ ID NO: 1122, c. CDR-H3 comprising the amino acid sequence of SEQ ID NO: 1664, d. CDR-L1 comprising the amino acid sequence of SEQ ID NO: 851, e. CDR-L2 comprising the amino acid sequence of SEQ ID NO: 1393, and f. CDR-L3 comprising the amino acid sequence of SEQ ID NO: 1935. In one aspect, the present disclosure provides an antibody or antigen-binding fragment thereof comprising a CDR-H3 comprising the amino acid sequence of SEQ ID NO: 1664, and a CDR-L3 comprising the amino acid sequence of SEQ ID NO: 1935.

[1125] In one aspect, the present disclosure provides an antibody or antigen-binding fragment thereof comprising at least one, at least two, or all three VH CDR sequences selected from: a. CDR-H1 comprising the amino acid sequence of SEQ ID NO: 580, b. CDR-H2 comprising the amino acid sequence of SEQ ID NO: 1122, c. CDR-H3 comprising the amino acid sequence of SEQ ID NO: 1664, and a VL comprising the amino acid sequence of SEQ ID NO: 309.

[1126] In one aspect, the present disclosure provides an antibody or antigen-binding fragment thereof comprising at least one, at least two, or all three VL CDR sequences selected from: a. CDR-L1 comprising the amino acid sequence of SEQ ID NO: 851, b. CDR-L2 comprising the amino acid sequence of SEQ ID NO: 1393, c. CDR-L3 comprising the amino acid sequence of SEQ ID NO: 1935, and a VH comprising the amino acid sequence of SEQ ID NO: 38.

[1127] In one aspect, an antibody or antigen-binding fragment thereof is provided, wherein the antibody or antigen-binding fragment thereof comprises a heavy chain variable domain (VH) having at least 90%, 91%, 92%, 93%, 94%, 95%, 96%, 97%, 98%, 99%, or 100% sequence identity to the amino acid sequence SEQ ID NO: 38. In some embodiments, a VH sequence having at least 90%, 91%, 92%, 93%, 94%, 95%, 96%, 97%, 98%, or 99% identity contains substitutions (e.g., conservative substitutions), insertions, or deletions relative to the reference sequence, but an antibody or antigen-binding fragment thereof comprising that sequence retains the ability to bind to same antigen as of the parent (e.g., cancer associated antigen). In some embodiments, a total of 1 to 10 amino acids have been substituted, inserted and/or deleted in the amino acid sequence SEQ ID NO: 38. In some embodiments, substitutions, insertions, or deletions occur in regions outside the CDRs (e.g., in the FRs). Optionally, the antibody or antigen-binding fragment thereof comprises the VH sequence SEQ ID NO: 38, including one or more post-translational modifications of that sequence. In a particular embodiment, the VH comprises one, two or three CDRs selected from: a. CDR-H1, comprising the amino acid sequence SEQ ID NO: 580, b. CDR-H2, comprising the amino acid sequence SEQ ID NO: 1122, and c. CDR-H3, comprising the amino acid sequence SEQ ID NO: 1664.

[1128] In one aspect, an antibody or antigen-binding fragment thereof is provided, wherein the antibody or antigen-binding fragment thereof comprises a light chain variable domain (VL) having at least 90%, 91%, 92%, 93%, 94%, 95%, 96%, 97%, 98%, 99%, or 100% sequence identity to the amino acid sequence SEQ ID NO: 309. In some embodiments, a VL sequence having at least 90%, 91%, 92%, 93%, 94%, 95%, 96%, 97%, 98%, or 99% identity contains substitutions (e.g., conservative substitutions), insertions, or deletions relative to the reference sequence, but an antibody or antigen-binding fragment thereof comprising that sequence retains the ability to bind to same antigen as the parent (e.g., cancer associated antigen). In some embodiments, a total of 1 to 10 amino acids have been substituted, inserted and/or deleted in the amino acid sequence SEQ ID NO: 309. In some embodiments, the substitutions, insertions, or deletions occur in regions outside the CDRs (e.g., in the FRs). Optionally, the antibody or antigen-binding fragment thereof comprises the VL sequence SEQ ID NO: 309, including one or more post-translational modifications of that sequence. In a particular embodiment, the VL comprises one, two or three CDRs selected from: a. CDR-L1, comprising the amino acid sequence SEQ ID NO: 851, b. CDR-L2, comprising the amino acid sequence SEQ ID NO: 1393, and c. CDR-L3, comprising the amino acid sequence SEQ ID NO: 1935.

[1129] In one aspect, an antibody or antigen-binding fragment thereof is provided, wherein the antibody or antigen-binding fragment thereof comprises a VH as in any of the embodiments provided above, and a VL as in any of the embodiments provided above. In some embodiments, the antibody or antigen-binding fragment thereof comprises the VH amino acid sequence of SEQ ID NO: 38, and the VL amino acid sequence of SEQ ID NO: 309, optionally including post-translational modifications of those sequences.

### TBRE1026

[1130] In one aspect, the present disclosure provides an antibody or antigen-binding fragment thereof comprising at least one or both variable regions selected from: a. VH comprising the amino acid sequence of SEQ ID NO: 39 and b. VL comprising the amino acid sequence of SEQ ID NO: 310.

[1131] In one aspect, the present disclosure provides an antibody or antigen-binding fragment thereof comprising at least one, two, three, four, five, or six CDRs selected from: a. CDR-H1 comprising the amino acid sequence of SEQ ID NO: 581, b. CDR-H2 comprising the amino acid sequence of SEQ ID NO: 1123, c. CDR-H3 comprising the amino acid sequence of SEQ ID NO: 1665, d. CDR-L1 comprising the amino acid sequence of SEQ ID NO: 852, e. CDR-L2 comprising the amino acid sequence of SEQ ID NO: 1394, and f. CDR-L3 comprising the amino acid sequence of SEQ ID NO: 1936.

[1132] In one aspect, the present disclosure provides an antibody or antigen-binding fragment thereof comprising a. CDR-H1 comprising the amino acid sequence of SEQ ID NO: 581, b. CDR-H2 comprising the amino acid sequence of SEQ ID NO: 1123, c. CDR-H3 comprising the amino acid sequence of SEQ ID NO: 1665, d. CDR-L1 comprising the amino acid sequence of SEQ ID NO: 852, e. CDR-L2 comprising the amino acid sequence of SEQ ID NO: 1394, and f. CDR-L3 comprising the amino acid sequence of SEQ ID NO: 1936. In one aspect, the present disclosure provides an antibody or antigen-binding fragment thereof comprising a CDR-H3 comprising the amino acid sequence of SEQ ID NO: 1665, and a CDR-L3 comprising the amino acid sequence of SEQ ID NO: 1936.

[1133] In one aspect, the present disclosure provides an antibody or antigen-binding fragment thereof comprising at least one, at least two, or all three VH CDR sequences selected from: a. CDR-H1 comprising the amino acid sequence of SEQ ID NO: 581, b. CDR-H2 comprising the amino acid sequence of SEQ ID NO: 1123, c. CDR-H3 comprising the amino acid sequence of SEQ ID NO: 1665, and a VL comprising the amino acid sequence of SEQ ID NO: 310.

[1134] In one aspect, the present disclosure provides an antibody or antigen-binding fragment thereof comprising at least one, at least two, or all three VL CDR sequences selected from: a. CDR-L1 comprising the amino acid sequence of SEQ ID NO: 852, b. CDR-L2 comprising the amino acid sequence of SEQ ID NO: 1394, c. CDR-L3 comprising the amino acid sequence of SEQ ID NO: 1936, and a VH comprising the amino acid sequence of SEQ ID NO: 39.

[1135] In one aspect, an antibody or antigen-binding fragment thereof is provided, wherein the antibody or antigen-binding fragment thereof comprises a heavy chain variable domain (VH) having at least 90%, 91%, 92%, 93%, 94%, 95%, 96%, 97%, 98%, 99%, or 100% sequence identity to the amino acid sequence SEQ ID NO: 39. In some embodiments, a VH sequence having at least 90%, 91%, 92%, 93%, 94%, 95%, 96%, 97%, 98%, or 99% identity contains substitutions (e.g., conservative substitutions), thereof comprising that sequence retains the ability to bind to same antigen as of the parent (e.g., cancer associated antigen). In some embodiments, a total of 1 to 10 amino acids have been substituted, inserted and/or deleted in the amino acid sequence SEQ ID NO: 39. In some embodiments, substitutions, insertions, or deletions occur in regions outside the CDRs (e.g., in the FRs). Optionally, the antibody or antigen-binding fragment thereof comprises the VH sequence SEQ ID NO: 39, including one or more post-translational modifications of that sequence. In a particular embodiment, the VH comprises one, two or three CDRs selected from: a. CDR-H1, comprising the amino acid sequence SEQ ID NO: 581, b. CDR-H2, comprising the amino acid sequence SEQ ID NO: 1123, and c. CDR-H3, comprising the amino acid sequence SEQ ID NO: 1665.

[1136] In one aspect, an antibody or antigen-binding fragment thereof is provided, wherein the antibody or antigen-binding fragment thereof comprises a light chain variable domain (VL) having at least 90%, 91%, 92%, 93%, 94%, 95%, 96%, 97%, 98%, 99%, or 100% sequence identity to the amino acid sequence SEQ ID NO: 310. In some embodiments, a VL sequence having at least 90%, 91%, 92%, 93%, 94%, 95%, 96%, 97%, 98%, or 99% identity contains substitutions (e.g., conservative substitutions), insertions, or deletions relative to the reference sequence, but an antibody or antigen-binding fragment thereof comprising that sequence retains the ability to bind to same antigen as the parent (e.g., cancer associated antigen). In some embodiments, a total of 1 to 10 amino acids have been substituted, inserted and/or deleted in the amino acid sequence SEQ ID NO: 310. In some embodiments, the substitutions, insertions, or deletions occur in regions outside the CDRs (e.g., in the FRs). Optionally, the antibody or antigen-binding fragment thereof comprises the VL sequence SEQ ID NO: 310, including one or more post-translational modifications of that sequence. In a particular embodiment, the VL comprises one, two or three CDRs selected from: a. CDR-L1, comprising the amino acid sequence SEQ ID NO: 852, b. CDR-L2, comprising the amino acid sequence SEQ ID NO: 1394, and c. CDR-L3, comprising the amino acid sequence SEQ ID NO: 1936.

[1137] In one aspect, an antibody or antigen-binding fragment thereof is provided, wherein the antibody or antigen-binding fragment thereof comprises a VH as in any of the embodiments provided above, and a VL as in any of the embodiments provided above. In some embodiments, the antibody or antigen-binding fragment thereof comprises the VH amino acid sequence of SEQ ID NO: 39, and the VL amino acid sequence of SEQ ID NO: 310, optionally including post-translational modifications of those sequences.

### TBRE1027

[1138] In one aspect, the present disclosure provides an antibody or antigen-binding fragment thereof comprising at least one or both variable regions selected from: a. VH comprising the amino acid sequence of SEQ ID NO: 40 and b. VL comprising the amino acid sequence of SEQ ID NO: 311.

[1139] In one aspect, the present disclosure provides an antibody or antigen-binding fragment thereof comprising at least one, two, three, four, five, or six CDRs selected from: a. CDR-H1 comprising the amino acid sequence of SEQ ID NO: 582, b. CDR-H2 comprising the amino acid sequence of SEQ ID NO: 1124, c. CDR-H3 comprising the amino acid sequence of SEQ ID NO: 1666, d. CDR-L1 comprising the amino acid sequence of SEQ ID NO: 853, e. CDR-L2 comprising the amino acid sequence of SEQ ID NO: 1395, and f. CDR-L3 comprising the amino acid sequence of SEQ ID NO: 1937.

[1140] In one aspect, the present disclosure provides an antibody or antigen-binding fragment thereof comprising: a. CDR-H1 comprising the amino acid sequence of SEQ ID NO: 582, b. CDR-H2 comprising the amino acid sequence of SEQ ID NO: 1124, c. CDR-H3 comprising the amino acid sequence of SEQ ID NO: 1666, d. CDR-L1 comprising the amino acid sequence of SEQ ID NO: 853, e. CDR-L2 comprising the amino acid sequence of SEQ ID NO: 1395, and f. CDR-L3 comprising the amino acid sequence of SEQ ID NO: 1937. In one aspect, the present disclosure provides an antibody or antigen-binding fragment thereof comprising a CDR-H3 comprising the amino acid sequence of SEQ ID NO: 1666, and a CDR-L3 comprising the amino acid sequence of SEQ ID NO: 1937.

[1141] In one aspect, the present disclosure provides an antibody or antigen-binding fragment thereof comprising at least one, at least two, or all three VH CDR sequences selected from: a. CDR-H1 comprising the amino acid sequence of SEQ ID NO: 582, b. CDR-H2 comprising the amino acid sequence of SEQ ID NO: 1124, c. CDR-H3 comprising the amino acid sequence of SEQ ID NO: 1666, and a. VL comprising the amino acid sequence of SEQ ID NO: 311.

[1142] In one aspect, the present disclosure provides an antibody or antigen-binding fragment thereof comprising at least one, at least two, or all three VL CDR sequences selected from: a. CDR-L1 comprising the amino acid sequence of SEQ ID NO: 853, b. CDR-L2 comprising the amino acid sequence of SEQ ID NO: 1395, c. CDR-L3 comprising the amino acid sequence of SEQ ID NO: 1937, and a VH comprising the amino acid sequence of SEQ ID NO: 40.

[1143] In one aspect, an antibody or antigen-binding fragment thereof is provided, wherein the antibody or antigen-binding fragment thereof comprises a heavy chain variable domain (VH) having at least 90%, 91%, 92%, 93%, 94%, 95%, 96%, 97%, 98%, 99%, or 100% sequence identity to the amino acid sequence SEQ ID NO: 40. In some embodiments, a VH sequence having at least 90%, 91%, 92%, 93%, 94%, 95%, 96%, 97%, 98%, or 99% identity contains substitutions (e.g., conservative substitutions), insertions, or deletions relative to the reference sequence, but an antibody or antigen-binding fragment thereof comprising that sequence retains the ability to bind to same antigen as of the parent (e.g., cancer associated antigen). In some embodiments, a total of 1 to 10 amino acids have been substituted, inserted and/or deleted in the amino acid sequence SEQ ID NO: 40. In some embodiments, substitutions, insertions, or deletions occur in regions outside the CDRs (e.g., in the FRs). Optionally, the antibody or antigen-binding fragment thereof comprises the VH sequence SEQ ID NO: 40, including one or more post-translational modifications of that sequence. In a particular embodiment, the VH comprises one, two or three CDRs selected from: a. CDR-H1, comprising the amino acid sequence SEQ ID NO: 582, b. CDR-H2, comprising the amino acid sequence SEQ ID NO: 1124, and c. CDR-H3, comprising the amino acid sequence SEQ ID NO: 1666.

[1144] In one aspect, an antibody or antigen-binding fragment thereof is provided, wherein the antibody or antigen-binding fragment thereof comprises a light chain variable domain (VL) having at least 90%, 91%, 92%, 93%, 94%, 95%, 96%, 97%, 98%, 99%, or 100% sequence identity to the amino acid sequence SEQ ID NO: 311. In some embodiments, a VL sequence having at least 90%, 91%, 92%, 93%, 94%, 95%, 96%, 97%, 98%, or 99% identity contains substitutions (e.g., conservative substitutions), insertions, or deletions relative to the reference sequence, but an antibody or antigen-binding fragment thereof comprising that sequence retains the ability to bind to same antigen as the parent (e.g., cancer associated antigen). In some embodiments, a total of 1 to 10 amino acids have been substituted, inserted and/or deleted in the amino acid sequence SEQ ID NO: 311. In some embodiments, the substitutions, insertions, or deletions occur in regions outside the CDRs (e.g., in the FRs). Optionally, the antibody or antigen-binding fragment thereof comprises the VL sequence SEQ ID NO: 311, including one or more post-translational modifications of that sequence. In a particular embodiment, the VL comprises one, two or three CDRs selected from: a. CDR-L1, comprising the amino acid sequence SEQ ID NO: 853, b. CDR-L2, comprising the amino acid sequence SEQ ID NO: 1395, and c. CDR-L3, comprising the amino acid sequence SEQ ID NO: 1937.

[1145] In one aspect, an antibody or antigen-binding fragment thereof is provided, wherein the antibody or antigen-binding fragment thereof comprises a VH as in any of the embodiments provided above, and a VL as in any of the embodiments provided above. In some embodiments, the antibody or antigen-binding fragment thereof comprises the VH amino acid sequence of SEQ ID NO: 40, and the VL amino acid sequence of SEQ ID NO: 311, optionally including post-translational modifications of those sequences.

### TBRE1028

[1146] In one aspect, the present disclosure provides an antibody or antigen-binding fragment thereof comprising at least one or both variable regions selected from: a. VH comprising the amino acid sequence of SEQ ID NO: 41 and b. VL comprising the amino acid sequence of SEQ ID NO: 312.

[1147] In one aspect, the present disclosure provides an antibody or antigen-binding fragment thereof comprising at least one, two, three, four, five, or six CDRs selected from: a. CDR-H1 comprising the amino acid sequence of SEQ ID NO: 583, b. CDR-H2 comprising the amino acid sequence of SEQ ID NO: 1125, c. CDR-H3 comprising the amino acid sequence of SEQ ID NO: 1667, d. CDR-L1 comprising the amino acid sequence of SEQ ID NO: 854, e. CDR-L2 comprising the amino acid sequence of SEQ ID NO: 1396, and f. CDR-L3 comprising the amino acid sequence of SEQ ID NO: 1938.

[1148] In one aspect, the present disclosure provides an antibody or antigen-binding fragment thereof comprising: a. CDR-H1 comprising the amino acid sequence of SEQ ID NO: 583, b. CDR-H2 comprising the amino acid sequence of SEQ ID NO: 1125, c. CDR-H3 comprising the amino acid sequence of SEQ ID NO: 1667, d. CDR-L1 comprising the amino acid sequence of SEQ ID NO: 854, e. CDR-L2 comprising the amino acid sequence of SEQ ID NO: 1396, and f. CDR-L3 comprising the amino acid sequence of SEQ ID NO: 1938. In one aspect, the present disclosure provides an antibody or antigen-binding fragment thereof comprising a CDR-H3 comprising the amino acid sequence of SEQ ID NO: 1667, and a CDR-L3 comprising the amino acid sequence of SEQ ID NO: 1938.

[1149] In one aspect, the present disclosure provides an antibody or antigen-binding fragment thereof comprising at least one, at least two, or all three VH CDR sequences selected from: a. CDR-H1 comprising the amino acid sequence of SEQ ID NO: 583, b. CDR-H2 comprising the amino acid sequence of SEQ ID NO: 1125, c. CDR-H3 comprising the amino acid sequence of SEQ ID NO: 1667, and a VL comprising the amino acid sequence of SEQ ID NO: 312.

[1150] In one aspect, the present disclosure provides an antibody or antigen-binding fragment thereof comprising at least one, at least two, or all three VL CDR sequences selected from: a. CDR-L1 comprising the amino acid sequence of SEQ ID NO: 854, b. CDR-L2 comprising the amino acid sequence of SEQ ID NO: 1396, c. CDR-L3 comprising the amino acid sequence of SEQ ID NO: 1938, and a VH comprising the amino acid sequence of SEQ ID NO: 41.

[1151] In one aspect, an antibody or antigen-binding fragment thereof is provided, wherein the antibody or antigen-binding fragment thereof comprises a heavy chain variable domain (VH) having at least 90%, 91%, 92%, 93%, 94%, 95%, 96%, 97%, 98%, 99%, or 100% sequence identity to the amino acid sequence SEQ ID NO: 41. In some embodiments, a VH sequence having at least 90%, 91%, 92%, 93%, 94%, 95%, 96%, 97%, 98%, or 99% identity contains substitutions (e.g., conservative substitutions), insertions, or deletions relative to the reference sequence, but an antibody or antigen-binding fragment thereof comprising that sequence retains the ability to bind to same antigen as of the parent (e.g., cancer associated antigen). In some embodiments, a total of 1 to 10 amino acids have been substituted, inserted and/or deleted in the amino acid sequence SEQ ID NO: 41. In some embodiments, substitutions, insertions, or deletions occur in regions outside the CDRs (e.g., in the FRs). Optionally, the antibody or antigen-binding fragment thereof comprises the VH sequence SEQ ID NO: 41, including one or more post-translational modifications of that sequence. In a particular embodiment, the VH comprises one, two or three CDRs selected from: a. CDR-H1, comprising the amino acid sequence SEQ ID NO: 583, b. CDR-H2, comprising the amino acid sequence SEQ ID NO: 1125, and c. CDR-H3, comprising the amino acid sequence SEQ ID NO: 1667.

[1152] In one aspect, an antibody or antigen-binding fragment thereof is provided, wherein the antibody or antigen-binding fragment thereof comprises a light chain variable domain (VL) having at least 90%, 91%, 92%, 93%, 94%, 95%, 96%, 97%, 98%, 99%, or 100% sequence identity to the amino acid sequence SEQ ID NO: 312. In some embodiments, a VL sequence having at least 90%, 91%, 92%, 93%, 94%, 95%, 96%, 97%, 98%, or 99% identity contains substitutions (e.g., conservative substitutions), insertions, or deletions relative to the reference sequence, but an antibody or antigen-binding fragment thereof comprising that sequence retains the ability to bind to same antigen as the parent (e.g., cancer associated antigen). In some embodiments, a total of 1 to 10 amino acids have been substituted, inserted and/or deleted in the amino acid sequence SEQ ID NO: 312. In some embodiments, the substitutions, insertions, or deletions occur in regions outside the CDRs (e.g., in the FRs). Optionally, the antibody or antigen-binding fragment thereof comprises the VL sequence SEQ ID NO: 312, including one or more post-translational modifications of that sequence. In a particular embodiment, the VL comprises one, two or three CDRs selected from: a. CDR-L1, comprising the amino acid sequence SEQ ID NO: 854, b. CDR-L2, comprising the amino acid sequence SEQ ID NO: 1396, and c. CDR-L3, comprising the amino acid sequence SEQ ID NO: 1938.

[1153] In one aspect, an antibody or antigen-binding fragment thereof is provided, wherein the antibody or antigen-binding fragment thereof comprises a VH as in any of the embodiments provided above, and a VL as in any of the embodiments provided above. In some embodiments, the antibody or antigen-binding fragment thereof comprises the VH amino acid sequence of SEQ ID NO: 41, and the VL amino acid sequence of SEQ ID NO: 312, optionally including post-translational modifications of those sequences.

### TBRE1029

[1154] In one aspect, the present disclosure provides an antibody or antigen-binding fragment thereof comprising at least one or both variable regions selected from: a. VH comprising the amino acid sequence of SEQ ID NO: 42 and b. VL comprising the amino acid sequence of SEQ ID NO: 313.

[1155] In one aspect, the present disclosure provides an antibody or antigen-binding fragment thereof comprising at least one, two, three, four, five, or six CDRs selected from: a. CDR-H1 comprising the amino acid sequence of SEQ ID NO: 584, b. CDR-H2 comprising the amino acid sequence of SEQ ID NO: 1126, c. CDR-H3 comprising the amino acid sequence of SEQ ID NO: 1668, d. CDR-L1 comprising the amino acid sequence of SEQ ID NO: 855, e. CDR-L2 comprising the amino acid sequence of SEQ ID NO: 1397, and f. CDR-L3 comprising the amino acid sequence of SEQ ID NO: 1939.

[1156] In one aspect, the present disclosure provides an antibody or antigen-binding fragment thereof comprising: a. CDR-H1 comprising the amino acid sequence of SEQ ID NO: 584, b. CDR-H2 comprising the amino acid sequence of SEQ ID NO: 1126, c. CDR-H3 comprising the amino acid sequence of SEQ ID NO: 1668, d. CDR-L1 comprising the amino acid sequence of SEQ ID NO: 855, e. CDR-L2 comprising the amino acid sequence of SEQ ID NO: 1397, and f. CDR-L3 comprising the amino acid sequence of SEQ ID NO: 1939. In one aspect, the present disclosure provides an antibody or antigen-binding fragment thereof comprising a CDR-H3 comprising the amino acid sequence of SEQ ID NO: 1668, and a CDR-L3 comprising the amino acid sequence of SEQ ID NO: 1939.

[1157] In one aspect, the present disclosure provides an antibody or antigen-binding fragment thereof comprising at least one, at least two, or all three VH CDR sequences selected from: a. CDR-H1 comprising the amino acid sequence of SEQ ID NO: 584, b. CDR-H2 comprising the amino acid sequence of SEQ ID NO: 1126, c. CDR-H3 comprising the amino acid sequence of SEQ ID NO: 1668, and a VL comprising the amino acid sequence of SEQ ID NO: 313.

[1158] In one aspect, the present disclosure provides an antibody or antigen-binding fragment thereof comprising at least one, at least two, or all three VL CDR sequences selected from: a. CDR-L1 comprising the amino acid sequence of SEQ ID NO: 855, b. CDR-L2 comprising the amino acid sequence of SEQ ID NO: 1397, c. CDR-L3 comprising the amino acid sequence of SEQ ID NO: 1939, and a VH comprising the amino acid sequence of SEQ ID NO: 42.

[1159] In one aspect, an antibody or antigen-binding fragment thereof is provided, wherein the antibody or antigen-binding fragment thereof comprises a heavy chain variable domain (VH) having at least 90%, 91%, 92%, 93%, 94%, 95%, 96%, 97%, 98%, 99%, or 100% sequence identity to the amino acid sequence SEQ ID NO: 42. In some embodiments, a VH sequence having at least 90%, 91%, 92%, 93%, 94%, 95%, 96%, 97%, 98%, or 99% identity contains substitutions (e.g., conservative substitutions), thereof comprising that sequence retains the ability to bind to same antigen as of the parent (e.g., cancer associated antigen). In some embodiments, a total of 1 to 10 amino acids have been substituted, inserted and/or deleted in the amino acid sequence SEQ ID NO: 42. In some embodiments, substitutions, insertions, or deletions occur in regions outside the CDRs (e.g., in the FRs). Optionally, the antibody or antigen-binding fragment thereof comprises the VH sequence SEQ ID NO: 42, including one or more post-translational modifications of that sequence. In a particular embodiment, the VH comprises one, two or three CDRs selected from: a. CDR-H1, comprising the amino acid sequence SEQ ID NO: 584, b. CDR-H2, comprising the amino acid sequence SEQ ID NO: 1126, and c. CDR-H3, comprising the amino acid sequence SEQ ID NO: 1668.

[1160] In one aspect, an antibody or antigen-binding fragment thereof is provided, wherein the antibody or antigen-binding fragment thereof comprises a light chain variable domain (VL) having at least 90%, 91%, 92%, 93%, 94%, 95%, 96%, 97%, 98%, 99%, or 100% sequence identity to the amino acid sequence SEQ ID NO: 313. In some embodiments, a VL sequence having at least 90%, 91%, 92%, 93%, 94%, 95%, 96%, 97%, 98%, or 99% identity contains substitutions (e.g., conservative substitutions), insertions, or deletions relative to the reference sequence, but an antibody or antigen-binding fragment thereof comprising that sequence retains the ability to bind to same antigen as the parent (e.g., cancer associated antigen). In some embodiments, a total of 1 to 10 amino acids have been substituted, inserted and/or deleted in the amino acid sequence SEQ ID NO: 313. In some embodiments, the substitutions, insertions, or deletions occur in regions outside the CDRs (e.g., in the FRs). Optionally, the antibody or antigen-binding fragment thereof comprises the VL sequence SEQ ID NO: 313, including one or more post-translational modifications of that sequence. In a particular embodiment, the VL comprises one, two or three CDRs selected from: a. CDR-L1, comprising the amino acid sequence SEQ ID NO: 855, b. CDR-L2, comprising the amino acid sequence SEQ ID NO: 1397, and c. CDR-L3, comprising the amino acid sequence SEQ ID NO: 1939.

[1161] In one aspect, an antibody or antigen-binding fragment thereof is provided, wherein the antibody or antigen-binding fragment thereof comprises a VH as in any of the embodiments provided above, and a VL as in any of the embodiments provided above. In some embodiments, the antibody or antigen-binding fragment thereof comprises the VH amino acid sequence of SEQ ID NO: 42, and the VL amino acid sequence of SEQ ID NO: 313, optionally including post-translational modifications of those sequences.

### TBRE1030

[1162] In one aspect, the present disclosure provides an antibody or antigen-binding fragment thereof comprising at least one or both variable regions selected from: a. VH comprising the amino acid sequence of SEQ ID NO: 43 and b. VL comprising the amino acid sequence of SEQ ID NO: 314.

[1163] In one aspect, the present disclosure provides an antibody or antigen-binding fragment thereof comprising at least one, two, three, four, five, or six CDRs selected from: a. CDR-H1 comprising the amino acid sequence of SEQ ID NO: 585, b. CDR-H2 comprising the amino acid sequence of SEQ ID NO: 1127, c. CDR-H3 comprising the amino acid sequence of SEQ ID NO: 1669, d. CDR-L1 comprising the amino acid sequence of SEQ ID NO: 856, e. CDR-L2 comprising the amino acid sequence of SEQ ID NO: 1398, and f. CDR-L3 comprising the amino acid sequence of SEQ ID NO: 1940.

[1164] In one aspect, the present disclosure provides an antibody or antigen-binding fragment thereof comprising: a. CDR-H1 comprising the amino acid sequence of SEQ ID NO: 585, b. CDR-H2 comprising the amino acid sequence of SEQ ID NO: 1127, c. CDR-H3 comprising the amino acid sequence of SEQ ID NO: 1669, d. CDR-L1 comprising the amino acid sequence of SEQ ID NO: 856, e. CDR-L2 comprising the amino acid sequence of SEQ ID NO: 1398, and f. CDR-L3 comprising the amino acid sequence of SEQ ID NO: 1940. In one aspect, the present disclosure provides an antibody or antigen-binding fragment thereof comprising a CDR-H3 comprising the amino acid sequence of SEQ ID NO: 1669, and a CDR-L3 comprising the amino acid sequence of SEQ ID NO: 1940.

[1165] In one aspect, the present disclosure provides an antibody or antigen-binding fragment thereof comprising at least one, at least two, or all three VH CDR sequences selected from: a. CDR-H1 comprising the amino acid sequence of SEQ ID NO: 585, b. CDR-H2 comprising the amino acid sequence of SEQ ID NO: 1127, c. CDR-H3 comprising the amino acid sequence of SEQ ID NO: 1669, and a VL comprising the amino acid sequence of SEQ ID NO: 314.

[1166] In one aspect, the present disclosure provides an antibody or antigen-binding fragment thereof comprising at least one, at least two, or all three VL CDR sequences selected from: a. CDR-L1 comprising the amino acid sequence of SEQ ID NO: 856, b. CDR-L2 comprising the amino acid sequence of SEQ ID NO: 1398, c. CDR-L3 comprising the amino acid sequence of SEQ ID NO: 1940, and a VH comprising the amino acid sequence of SEQ ID NO: 43.

[1167] In one aspect, an antibody or antigen-binding fragment thereof is provided, wherein the antibody or antigen-binding fragment thereof comprises a heavy chain variable domain (VH) having at least 90%, 91%, 92%, 93%, 94%, 95%, 96%, 97%, 98%, 99%, or 100% sequence identity to the amino acid sequence SEQ ID NO: 43. In some embodiments, a VH sequence having at least 90%, 91%, 92%, 93%, 94%, 95%, 96%, 97%, 98%, or 99% identity contains substitutions (e.g., conservative substitutions), insertions, or deletions relative to the reference sequence, but an antibody or antigen-binding fragment thereof comprising that sequence retains the ability to bind to same antigen as of the parent (e.g., cancer associated antigen). In some embodiments, a total of 1 to 10 amino acids have been substituted, inserted and/or deleted in the amino acid sequence SEQ ID NO: 43. In some embodiments, substitutions, insertions, or deletions occur in regions outside the CDRs (e.g., in the FRs). Optionally, the antibody or antigen-binding fragment thereof comprises the VH sequence SEQ ID NO: 43, including one or more post-translational modifications of that sequence. In a particular embodiment, the VH comprises one, two or three CDRs selected from: a. CDR-H1, comprising the amino acid sequence SEQ ID NO: 585, b. CDR-H2, comprising the amino acid sequence SEQ ID NO: 1127, and a CDR-H3, comprising the amino acid sequence SEQ ID NO: 1669.

[1168] In one aspect, an antibody or antigen-binding fragment thereof is provided, wherein the antibody or antigen-binding fragment thereof comprises a light chain variable domain (VL) having at least 90%, 91%, 92%, 93%, 94%, 95%, 96%, 97%, 98%, 99%, or 100% sequence identity to the amino acid sequence SEQ ID NO: 314. In some embodiments, a VL sequence having at least 90%, 91%, 92%, 93%, 94%, 95%, 96%, 97%, 98%, or 99% identity contains substitutions (e.g., conservative substitutions), insertions, or deletions relative to the reference sequence, but an antibody or antigen-binding fragment thereof comprising that sequence retains the ability to bind to same antigen as the parent (e.g., cancer associated antigen). In some embodiments, a total of 1 to 10 amino acids have been substituted, inserted and/or deleted in the amino acid sequence SEQ ID NO: 314. In some embodiments, the substitutions, insertions, or deletions occur in regions outside the CDRs (e.g., in the FRs). Optionally, the antibody or antigen-binding fragment thereof comprises the VL sequence SEQ ID NO: 314, including one or more post-translational modifications of that sequence. In a particular embodiment, the VL comprises one, two or three CDRs selected from: a. CDR-L1, comprising the amino acid sequence SEQ ID NO: 856, b. CDR-L2, comprising the amino acid sequence SEQ ID NO: 1398, and c. CDR-L3, comprising the amino acid sequence SEQ ID NO: 1940.

[1169] In one aspect, an antibody or antigen-binding fragment thereof is provided, wherein the antibody or antigen-binding fragment thereof comprises a VH as in any of the embodiments provided above, and a VL as in any of the embodiments provided above. In some embodiments, the antibody or antigen-binding fragment thereof comprises the VH amino acid sequence of SEQ ID NO: 43, and the VL amino acid sequence of SEQ ID NO: 314, optionally including post-translational modifications of those sequences.

### TBRE1031

[1170] In one aspect, the present disclosure provides an antibody or antigen-binding fragment thereof comprising at least one or both variable regions selected from: a. VH comprising the amino acid sequence of SEQ ID NO: 44 and b. VL comprising the amino acid sequence of SEQ ID NO: 315.

[1171] In one aspect, the present disclosure provides an antibody or antigen-binding fragment thereof comprising at least one, two, three, four, five, or six CDRs selected from: a. CDR-H1 comprising the amino acid sequence of SEQ ID NO: 586, b. CDR-H2 comprising the amino acid sequence of SEQ ID NO: 1128, c. CDR-H3 comprising the amino acid sequence of SEQ ID NO: 1670, d. CDR-L1 comprising the amino acid sequence of SEQ ID NO: 857, e. CDR-L2 comprising the amino acid sequence of SEQ ID NO: 1399, and f. CDR-L3 comprising the amino acid sequence of SEQ ID NO: 1941.

[1172] In one aspect, the present disclosure provides an antibody or antigen-binding fragment thereof comprising: a. CDR-H1 comprising the amino acid sequence of SEQ ID NO: 586, b. CDR-H2 comprising the amino acid sequence of SEQ ID NO: 1128, c. CDR-H3 comprising the amino acid sequence of SEQ ID NO: 1670, d. CDR-L1 comprising the amino acid sequence of SEQ ID NO: 857, e. CDR-L2 comprising the amino acid sequence of SEQ ID NO: 1399, and f. CDR-L3 comprising the amino acid sequence of SEQ ID NO: 1941. In one aspect, the present disclosure provides an antibody or antigen-binding fragment thereof comprising a CDR-H3 comprising the amino acid sequence of SEQ ID NO: 1670, and a CDR-L3 comprising the amino acid sequence of SEQ ID NO: 1941.

[1173] In one aspect, the present disclosure provides an antibody or antigen-binding fragment thereof comprising at least one, at least two, or all three VH CDR sequences selected from: a. CDR-H1 comprising the amino acid sequence of SEQ ID NO: 586, b. CDR-H2 comprising the amino acid sequence of SEQ ID NO: 1128, c. CDR-H3 comprising the amino acid sequence of SEQ ID NO: 1670, and a VL comprising the amino acid sequence of SEQ ID NO: 315.

[1174] In one aspect, the present disclosure provides an antibody or antigen-binding fragment thereof comprising at least one, at least two, or all three VL CDR sequences selected from: a. CDR-L1 comprising the amino acid sequence of SEQ ID NO: 857, b. CDR-L2 comprising the amino acid sequence of SEQ ID NO: 1399, c. CDR-L3 comprising the amino acid sequence of SEQ ID NO: 1941, and a VH comprising the amino acid sequence of SEQ ID NO: 44.

[1175] In one aspect, an antibody or antigen-binding fragment thereof is provided, wherein the antibody or antigen-binding fragment thereof comprises a heavy chain variable domain (VH) having at least 90%, 91%, 92%, 93%, 94%, 95%, 96%, 97%, 98%, 99%, or 100% sequence identity to the amino acid sequence SEQ ID NO: 44. In some embodiments, a VH sequence having at least 90%, 91%, 92%, 93%, 94%, 95%, 96%, 97%, 98%, or 99% identity contains substitutions (e.g., conservative substitutions), insertions, or deletions relative to the reference sequence, but an antibody or antigen-binding fragment thereof comprising that sequence retains the ability to bind to same antigen as of the parent (e.g., cancer associated antigen). In some embodiments, a total of 1 to 10 amino acids have been substituted, inserted and/or deleted in the amino acid sequence SEQ ID NO: 44. In some embodiments, substitutions, insertions, or deletions occur in regions outside the CDRs (e.g., in the FRs). Optionally, the antibody or antigen-binding fragment thereof comprises the VH sequence SEQ ID NO: 44, including one or more post-translational modifications of that sequence. In a particular embodiment, the VH comprises one, two or three CDRs selected from: a. CDR-H1, comprising the amino acid sequence SEQ ID NO: 586, b. CDR-H2, comprising the amino acid sequence SEQ ID NO: 1128, and c. CDR-H3, comprising the amino acid sequence SEQ ID NO: 1670.

[1176] In one aspect, an antibody or antigen-binding fragment thereof is provided, wherein the antibody or antigen-binding fragment thereof comprises a light chain variable domain (VL) having at least 90%, 91%, 92%, 93%, 94%, 95%, 96%, 97%, 98%, 99%, or 100% sequence identity to the amino acid sequence SEQ ID NO: 315. In some embodiments, a VL sequence having at least 90%, 91%, 92%, 93%, 94%, 95%, 96%, 97%, 98%, or 99% identity contains substitutions (e.g., conservative substitutions), insertions, or deletions relative to the reference sequence, but an antibody or antigen-binding fragment thereof comprising that sequence retains the ability to bind to same antigen as the parent (e.g., cancer associated antigen). In some embodiments, a total of 1 to 10 amino acids have been substituted, inserted and/or deleted in the amino acid sequence SEQ ID NO: 315. In some embodiments, the substitutions, insertions, or deletions occur in regions outside the CDRs (e.g., in the FRs). Optionally, the antibody or antigen-binding fragment thereof comprises the VL sequence SEQ ID NO: 315, including one or more post-translational modifications of that sequence. In a particular embodiment, the VL comprises one, two or three CDRs selected from: a. CDR-L1, comprising the amino acid sequence SEQ ID NO: 857, b. CDR-L2, comprising the amino acid sequence SEQ ID NO: 1399, and c. CDR-L3, comprising the amino acid sequence SEQ ID NO: 1941.

[1177] In one aspect, an antibody or antigen-binding fragment thereof is provided, wherein the antibody or antigen-binding fragment thereof comprises a VH as in any of the embodiments provided above, and a VL as in any of the embodiments provided above. In some embodiments, the antibody or antigen-binding fragment thereof comprises the VH amino acid sequence of SEQ ID NO: 44, and the VL amino acid sequence of SEQ ID NO: 315, optionally including post-translational modifications of those sequences.

### TBRE1032

[1178] In one aspect, the present disclosure provides an antibody or antigen-binding fragment thereof comprising at least one or both variable regions selected from: a. VH comprising the amino acid sequence of SEQ ID NO: 45 and b. VL comprising the amino acid sequence of SEQ ID NO: 316.

[1179] In one aspect, the present disclosure provides an antibody or antigen-binding fragment thereof comprising at least one, two, three, four, five, or six CDRs selected from: a. CDR-H1 comprising the amino acid sequence of SEQ ID NO: 587, b. CDR-H2 comprising the amino acid sequence of SEQ ID NO: 1129, c. CDR-H3 comprising the amino acid sequence of SEQ ID NO: 1671, d. CDR-L1 comprising the amino acid sequence of SEQ ID NO: 858, e. CDR-L2 comprising the amino acid sequence of SEQ ID NO: 1400, and f. CDR-L3 comprising the amino acid sequence of SEQ ID NO: 1942.

[1180] In one aspect, the present disclosure provides an antibody or antigen-binding fragment thereof comprising: a. CDR-H1 comprising the amino acid sequence of SEQ ID NO: 587, b. CDR-H2 comprising the amino acid sequence of SEQ ID NO: 1129, c. CDR-H3 comprising the amino acid sequence of SEQ ID NO: 1671, d. CDR-L1 comprising the amino acid sequence of SEQ ID NO: 858, e. CDR-L2 comprising the amino acid sequence of SEQ ID NO: 1400, and f. CDR-L3 comprising the amino acid sequence of SEQ ID NO: 1942. In one aspect, the present disclosure provides an antibody or antigen-binding fragment thereof comprising a CDR-H3 comprising the amino acid sequence of SEQ ID NO: 1671, and a CDR-L3 comprising the amino acid sequence of SEQ ID NO: 1942.

[1181] In one aspect, the present disclosure provides an antibody or antigen-binding fragment thereof comprising at least one, at least two, or all three VH CDR sequences selected from: a. CDR-H1 comprising the amino acid sequence of SEQ ID NO: 587, b. CDR-H2 comprising the amino acid sequence of SEQ ID NO: 1129, c. CDR-H3 comprising the amino acid sequence of SEQ ID NO: 1671, and a VL comprising the amino acid sequence of SEQ ID NO: 316.

[1182] In one aspect, the present disclosure provides an antibody or antigen-binding fragment thereof comprising at least one, at least two, or all three VL CDR sequences selected from: a. CDR-L1 comprising the amino acid sequence of SEQ ID NO: 858, b. CDR-L2 comprising the amino acid sequence of SEQ ID NO: 1400, c. CDR-L3 comprising the amino acid sequence of SEQ ID NO: 1942, and VH comprising the amino acid sequence of SEQ ID NO: 45.

[1183] In one aspect, an antibody or antigen-binding fragment thereof is provided, wherein the antibody or antigen-binding fragment thereof comprises a heavy chain variable domain (VH) having at least 90%, 91%, 92%, 93%, 94%, 95%, 96%, 97%, 98%, 99%, or 100% sequence identity to the amino acid sequence SEQ ID NO: 45. In some embodiments, a VH sequence having at least 90%, 91%, 92%, 93%, 94%, 95%, 96%, 97%, 98%, or 99% identity contains substitutions (e.g., conservative substitutions), thereof comprising that sequence retains the ability to bind to same antigen as of the parent (e.g., cancer associated antigen). In some embodiments, a total of 1 to 10 amino acids have been substituted, inserted and/or deleted in the amino acid sequence SEQ ID NO: 45. In some embodiments, substitutions, insertions, or deletions occur in regions outside the CDRs (e.g., in the FRs). Optionally, the antibody or antigen-binding fragment thereof comprises the VH sequence SEQ ID NO: 45, including one or more post-translational modifications of that sequence. In a particular embodiment, the VH comprises one, two or three CDRs selected from: a. CDR-H1, comprising the amino acid sequence SEQ ID NO: 587, b. CDR-H2, comprising the amino acid sequence SEQ ID NO: 1129, and c. CDR-H3, comprising the amino acid sequence SEQ ID NO: 1671.

[1184] In one aspect, an antibody or antigen-binding fragment thereof is provided, wherein the antibody or antigen-binding fragment thereof comprises a light chain variable domain (VL) having at least 90%, 91%, 92%, 93%, 94%, 95%, 96%, 97%, 98%, 99%, or 100% sequence identity to the amino acid sequence SEQ ID NO: 316. In some embodiments, a VL sequence having at least 90%, 91%, 92%, 93%, 94%, 95%, 96%, 97%, 98%, or 99% identity contains substitutions (e.g., conservative substitutions), insertions, or deletions relative to the reference sequence, but an antibody or antigen-binding fragment thereof comprising that sequence retains the ability to bind to same antigen as the parent (e.g., cancer associated antigen). In some embodiments, a total of 1 to 10 amino acids have been substituted, inserted and/or deleted in the amino acid sequence SEQ ID NO: 316. In some embodiments, the substitutions, insertions, or deletions occur in regions outside the CDRs (e.g., in the FRs). Optionally, the antibody or antigen-binding fragment thereof comprises the VL sequence SEQ ID NO: 316, including one or more post-translational modifications of that sequence. In a particular embodiment, the VL comprises one, two or three CDRs selected from: a. CDR-L1, comprising the amino acid sequence SEQ ID NO: 858, b. CDR-L2, comprising the amino acid sequence SEQ ID NO: 1400, and c. CDR-L3, comprising the amino acid sequence SEQ ID NO: 1942.

[1185] In one aspect, an antibody or antigen-binding fragment thereof is provided, wherein the antibody or antigen-binding fragment thereof comprises a VH as in any of the embodiments provided above, and a VL as in any of the embodiments provided above. In some embodiments, the antibody or antigen-binding fragment thereof comprises the VH amino acid sequence of SEQ ID NO: 45, and the VL amino acid sequence of SEQ ID NO: 316, optionally including post-translational modifications of those sequences.

### TBRE1033

[1186] In one aspect, the present disclosure provides an antibody or antigen-binding fragment thereof comprising at least one or both variable regions selected from: a. VH comprising the amino acid sequence of SEQ ID NO: 46 and b. VL comprising the amino acid sequence of SEQ ID NO: 317.

[1187] In one aspect, the present disclosure provides an antibody or antigen-binding fragment thereof comprising at least one, two, three, four, five, or six CDRs selected from: a. CDR-H1 comprising the amino acid sequence of SEQ ID NO: 588, b. CDR-H2 comprising the amino acid sequence of SEQ ID NO: 1130, c. CDR-H3 comprising the amino acid sequence of SEQ ID NO: 1672, d. CDR-L1 comprising the amino acid sequence of SEQ ID NO: 859, e. CDR-L2 comprising the amino acid sequence of SEQ ID NO: 1401, and f. CDR-L3 comprising the amino acid sequence of SEQ ID NO: 1943.

[1188] In one aspect, the present disclosure provides an antibody or antigen-binding fragment thereof comprising: a. CDR-H1 comprising the amino acid sequence of SEQ ID NO: 588, b. CDR-H2 comprising the amino acid sequence of SEQ ID NO: 1130, c. CDR-H3 comprising the amino acid sequence of SEQ ID NO: 1672, d. CDR-L1 comprising the amino acid sequence of SEQ ID NO: 859, e. CDR-L2 comprising the amino acid sequence of SEQ ID NO: 1401, and f. CDR-L3 comprising the amino acid sequence of SEQ ID NO: 1943. In one aspect, the present disclosure provides an antibody or antigen-binding fragment thereof comprising a CDR-H3 comprising the amino acid sequence of SEQ ID NO: 1672, and a CDR-L3 comprising the amino acid sequence of SEQ ID NO: 1943.

[1189] In one aspect, the present disclosure provides an antibody or antigen-binding fragment thereof comprising at least one, at least two, or all three VH CDR sequences selected from: a. CDR-H1 comprising the amino acid sequence of SEQ ID NO: 588, b. CDR-H2 comprising the amino acid sequence of SEQ ID NO: 1130, c. CDR-H3 comprising the amino acid sequence of SEQ ID NO: 1672, and a VL comprising the amino acid sequence of SEQ ID NO: 317.

[1190] In one aspect, the present disclosure provides an antibody or antigen-binding fragment thereof comprising at least one, at least two, or all three VL CDR sequences selected from: a. CDR-L1 comprising the amino acid sequence of SEQ ID NO: 859, b. CDR-L2 comprising the amino acid sequence of SEQ ID NO: 1401, c. CDR-L3 comprising the amino acid sequence of SEQ ID NO: 1943, and a VH comprising the amino acid sequence of SEQ ID NO: 46.

[1191] In one aspect, an antibody or antigen-binding fragment thereof is provided, wherein the antibody or antigen-binding fragment thereof comprises a heavy chain variable domain (VH) having at least 90%, 91%, 92%, 93%, 94%, 95%, 96%, 97%, 98%, 99%, or 100% sequence identity to the amino acid sequence SEQ ID NO: 46. In some embodiments, a VH sequence having at least 90%, 91%, 92%, 93%, 94%, 95%, 96%, 97%, 98%, or 99% identity contains substitutions (e.g., conservative substitutions), insertions, or deletions relative to the reference sequence, but an antibody or antigen-binding fragment thereof comprising that sequence retains the ability to bind to same antigen as of the parent (e.g., cancer associated antigen). In some embodiments, a total of 1 to 10 amino acids have been substituted, inserted and/or deleted in the amino acid sequence SEQ ID NO: 46. In some embodiments, substitutions, insertions, or deletions occur in regions outside the CDRs (e.g., in the FRs). Optionally, the antibody or antigen-binding fragment thereof comprises the VH sequence SEQ ID NO: 46, including one or more post-translational modifications of that sequence. In a particular embodiment, the VH comprises one, two or three CDRs selected from: a. CDR-H1, comprising the amino acid sequence SEQ ID NO: 588, b. CDR-H2, comprising the amino acid sequence SEQ ID NO: 1130, and c. CDR-H3, comprising the amino acid sequence SEQ ID NO: 1672.

[1192] In one aspect, an antibody or antigen-binding fragment thereof is provided, wherein the antibody or antigen-binding fragment thereof comprises a light chain variable domain (VL) having at least 90%, 91%, 92%, 93%, 94%, 95%, 96%, 97%, 98%, 99%, or 100% sequence identity to the amino acid sequence SEQ ID NO: 317. In some embodiments, a VL sequence having at least 90%, 91%, 92%, 93%, 94%, 95%, 96%, 97%, 98%, or 99% identity contains substitutions (e.g., conservative substitutions), insertions, or deletions relative to the reference sequence, but an antibody or antigen-binding fragment thereof comprising that sequence retains the ability to bind to same antigen as the parent (e.g., cancer associated antigen). In some embodiments, a total of 1 to 10 amino acids have been substituted, inserted and/or deleted in the amino acid sequence SEQ ID NO: 317. In some embodiments, the substitutions, insertions, or deletions occur in regions outside the CDRs (e.g., in the FRs). Optionally, the antibody or antigen-binding fragment thereof comprises the VL sequence SEQ ID NO: 317, including one or more post-translational modifications of that sequence. In a particular embodiment, the VL comprises one, two or three CDRs selected from: a. CDR-L1, comprising the amino acid sequence SEQ ID NO: 859, b. CDR-L2, comprising the amino acid sequence SEQ ID NO: 1401, and c. CDR-L3, comprising the amino acid sequence SEQ ID NO: 1943.

[1193] In one aspect, an antibody or antigen-binding fragment thereof is provided, wherein the antibody or antigen-binding fragment thereof comprises a VH as in any of the embodiments provided above, and a VL as in any of the embodiments provided above. In some embodiments, the antibody or antigen-binding fragment thereof comprises the VH amino acid sequence of SEQ ID NO: 46, and the VL amino acid sequence of SEQ ID NO: 317, optionally including post-translational modifications of those sequences.

### TBRE1034

[1194] In one aspect, the present disclosure provides an antibody or antigen-binding fragment thereof comprising at least one or both variable regions selected from: a. VH comprising the amino acid sequence of SEQ ID NO: 47 and b. VL comprising the amino acid sequence of SEQ ID NO: 318.

[1195] In one aspect, the present disclosure provides an antibody or antigen-binding fragment thereof comprising at least one, two, three, four, five, or six CDRs selected from: a. CDR-H1 comprising the amino acid sequence of SEQ ID NO: 589, b. CDR-H2 comprising the amino acid sequence of SEQ ID NO: 1131, c. CDR-H3 comprising the amino acid sequence of SEQ ID NO: 1673, d. CDR-L1 comprising the amino acid sequence of SEQ ID NO: 860, e. CDR-L2 comprising the amino acid sequence of SEQ ID NO: 1402, and f. CDR-L3 comprising the amino acid sequence of SEQ ID NO: 1944.

[1196] In one aspect, the present disclosure provides an antibody or antigen-binding fragment thereof comprising: a. CDR-H1 comprising the amino acid sequence of SEQ ID NO: 589, b. CDR-H2 comprising the amino acid sequence of SEQ ID NO: 1131, c. CDR-H3 comprising the amino acid sequence of SEQ ID NO: 1673, d. CDR-L1 comprising the amino acid sequence of SEQ ID NO: 860, e. CDR-L2 comprising the amino acid sequence of SEQ ID NO: 1402, and f. CDR-L3 comprising the amino acid sequence of SEQ ID NO: 1944. In one aspect, the present disclosure provides an antibody or antigen-binding fragment thereof comprising a CDR-H3 comprising the amino acid sequence of SEQ ID NO: 1673, and a CDR-L3 comprising the amino acid sequence of SEQ ID NO: 1944.

[1197] In one aspect, the present disclosure provides an antibody or antigen-binding fragment thereof comprising at least one, at least two, or all three VH CDR sequences selected from: a. CDR-H1 comprising the amino acid sequence of SEQ ID NO: 589, b. CDR-H2 comprising the amino acid sequence of SEQ ID NO: 1131, c. CDR-H3 comprising the amino acid sequence of SEQ ID NO: 1673, and a VL comprising the amino acid sequence of SEQ ID NO: 318.

[1198] In one aspect, the present disclosure provides an antibody or antigen-binding fragment thereof comprising at least one, at least two, or all three VL CDR sequences selected from: a. CDR-L1 comprising the amino acid sequence of SEQ ID NO: 860, b. CDR-L2 comprising the amino acid sequence of SEQ ID NO: 1402, c. CDR-L3 comprising the amino acid sequence of SEQ ID NO: 1944, and a VH comprising the amino acid sequence of SEQ ID NO: 47.

[1199] In one aspect, an antibody or antigen-binding fragment thereof is provided, wherein the antibody or antigen-binding fragment thereof comprises a heavy chain variable domain (VH) having at least 90%, 91%, 92%, 93%, 94%, 95%, 96%, 97%, 98%, 99%, or 100% sequence identity to the amino acid sequence SEQ ID NO: 47. In some embodiments, a VH sequence having at least 90%, 91%, 92%, 93%, 94%, 95%, 96%, 97%, 98%, or 99% identity contains substitutions (e.g., conservative substitutions), insertions, or deletions relative to the reference sequence, but an antibody or antigen-binding fragment thereof comprising that sequence retains the ability to bind to same antigen as of the parent (e.g., cancer associated antigen). In some embodiments, a total of 1 to 10 amino acids have been substituted, inserted and/or deleted in the amino acid sequence SEQ ID NO: 47. In some embodiments, substitutions, insertions, or deletions occur in regions outside the CDRs (e.g., in the FRs). Optionally, the antibody or antigen-binding fragment thereof comprises the VH sequence SEQ ID NO: 47, including one or more post-translational modifications of that sequence. In a particular embodiment, the VH comprises one, two or three CDRs selected from: a. CDR-H1, comprising the amino acid sequence SEQ ID NO: 589, b. CDR-H2, comprising the amino acid sequence SEQ ID NO: 1131, and c. CDR-H3, comprising the amino acid sequence SEQ ID NO: 1673.

[1200] In one aspect, an antibody or antigen-binding fragment thereof is provided, wherein the antibody or antigen-binding fragment thereof comprises a light chain variable domain (VL) having at least 90%, 91%, 92%, 93%, 94%, 95%, 96%, 97%, 98%, 99%, or 100% sequence identity to the amino acid sequence SEQ ID NO: 318. In some embodiments, a VL sequence having at least 90%, 91%, 92%, 93%, 94%, 95%, 96%, 97%, 98%, or 99% identity contains substitutions (e.g., conservative substitutions), insertions, or deletions relative to the reference sequence, but an antibody or antigen-binding fragment thereof comprising that sequence retains the ability to bind to same antigen as the parent (e.g., cancer associated antigen). In some embodiments, a total of 1 to 10 amino acids have been substituted, inserted and/or deleted in the amino acid sequence SEQ ID NO: 318. In some embodiments, the substitutions, insertions, or deletions occur in regions outside the CDRs (e.g., in the FRs). Optionally, the antibody or antigen-binding fragment thereof comprises the VL sequence SEQ ID NO: 318, including one or more post-translational modifications of that sequence. In a particular embodiment, the VL comprises one, two or three CDRs selected from: a. CDR-L1, comprising the amino acid sequence SEQ ID NO: 860, b. CDR-L2, comprising the amino acid sequence SEQ ID NO: 1402, and c. CDR-L3, comprising the amino acid sequence SEQ ID NO: 1944.

[1201] In one aspect, an antibody or antigen-binding fragment thereof is provided, wherein the antibody or antigen-binding fragment thereof comprises a VH as in any of the embodiments provided above, and a VL as in any of the embodiments provided above. In some embodiments, the antibody or antigen-binding fragment thereof comprises the VH amino acid sequence of SEQ ID NO: 47, and the VL amino acid sequence of SEQ ID NO: 318, optionally including post-translational modifications of those sequences.

### TBRE1035

[1202] In one aspect, the present disclosure provides an antibody or antigen-binding fragment thereof comprising at least one or both variable regions selected from: a. VH comprising the amino acid sequence of SEQ ID NO: 48 and b. VL comprising the amino acid sequence of SEQ ID NO: 319.

[1203] In one aspect, the present disclosure provides an antibody or antigen-binding fragment thereof comprising at least one, two, three, four, five, or six CDRs selected from: a. CDR-H1 comprising the amino acid sequence of SEQ ID NO: 590, b. CDR-H2 comprising the amino acid sequence of SEQ ID NO: 1132, c. CDR-H3 comprising the amino acid sequence of SEQ ID NO: 1674, d. CDR-L1 comprising the amino acid sequence of SEQ ID NO: 861, e. CDR-L2 comprising the amino acid sequence of SEQ ID NO: 1403, and f. CDR-L3 comprising the amino acid sequence of SEQ ID NO: 1945.

[1204] In one aspect, the present disclosure provides an antibody or antigen-binding fragment thereof comprising: a. CDR-H1 comprising the amino acid sequence of SEQ ID NO: 590, b. CDR-H2 comprising the amino acid sequence of SEQ ID NO: 1132, c. CDR-H3 comprising the amino acid sequence of SEQ ID NO: 1674, d. CDR-L1 comprising the amino acid sequence of SEQ ID NO: 861, e. CDR-L2 comprising the amino acid sequence of SEQ ID NO: 1403, and f. CDR-L3 comprising the amino acid sequence of SEQ ID NO: 1945. In one aspect, the present disclosure provides an antibody or antigen-binding fragment thereof comprising a CDR-H3 comprising the amino acid sequence of SEQ ID NO: 1674, and a CDR-L3 comprising the amino acid sequence of SEQ ID NO: 1945.

[1205] In one aspect, the present disclosure provides an antibody or antigen-binding fragment thereof comprising at least one, at least two, or all three VH CDR sequences selected from: a. CDR-H1 comprising the amino acid sequence of SEQ ID NO: 590, b. CDR-H2 comprising the amino acid sequence of SEQ ID NO: 1132, c. CDR-H3 comprising the amino acid sequence of SEQ ID NO: 1674, and a VL comprising the amino acid sequence of SEQ ID NO: 319.

[1206] In one aspect, the present disclosure provides an antibody or antigen-binding fragment thereof comprising at least one, at least two, or all three VL CDR sequences selected from: a. CDR-L1 comprising the amino acid sequence of SEQ ID NO: 861, b. CDR-L2 comprising the amino acid sequence of SEQ ID NO: 1403, c. CDR-L3 comprising the amino acid sequence of SEQ ID NO: 1945, and a VH comprising the amino acid sequence of SEQ ID NO: 48.

[1207] In one aspect, an antibody or antigen-binding fragment thereof is provided, wherein the antibody or antigen-binding fragment thereof comprises a heavy chain variable domain (VH) having at least 90%, 91%, 92%, 93%, 94%, 95%, 96%, 97%, 98%, 99%, or 100% sequence identity to the amino acid sequence SEQ ID NO: 48. In some embodiments, a VH sequence having at least 90%, 91%, 92%, 93%, 94%, 95%, 96%, 97%, 98%, or 99% identity contains substitutions (e.g., conservative substitutions), thereof comprising that sequence retains the ability to bind to same antigen as of the parent (e.g., cancer associated antigen). In some embodiments, a total of 1 to 10 amino acids have been substituted, inserted and/or deleted in the amino acid sequence SEQ ID NO: 48. In some embodiments, substitutions, insertions, or deletions occur in regions outside the CDRs (e.g., in the FRs). Optionally, the antibody or antigen-binding fragment thereof comprises the VH sequence SEQ ID NO: 48, including one or more post-translational modifications of that sequence. In a particular embodiment, the VH comprises one, two or three CDRs selected from: a. CDR-H1, comprising the amino acid sequence SEQ ID NO: 590, b. CDR-H2, comprising the amino acid sequence SEQ ID NO: 1132, and c. CDR-H3, comprising the amino acid sequence SEQ ID NO: 1674.

[1208] In one aspect, an antibody or antigen-binding fragment thereof is provided, wherein the antibody or antigen-binding fragment thereof comprises a light chain variable domain (VL) having at least 90%, 91%, 92%, 93%, 94%, 95%, 96%, 97%, 98%, 99%, or 100% sequence identity to the amino acid sequence SEQ ID NO: 319. In some embodiments, a VL sequence having at least 90%, 91%, 92%, 93%, 94%, 95%, 96%, 97%, 98%, or 99% identity contains substitutions (e.g., conservative substitutions), insertions, or deletions relative to the reference sequence, but an antibody or antigen-binding fragment thereof comprising that sequence retains the ability to bind to same antigen as the parent (e.g., cancer associated antigen). In some embodiments, a total of 1 to 10 amino acids have been substituted, inserted and/or deleted in the amino acid sequence SEQ ID NO: 319. In some embodiments, the substitutions, insertions, or deletions occur in regions outside the CDRs (e.g., in the FRs). Optionally, the antibody or antigen-binding fragment thereof comprises the VL sequence SEQ ID NO: 319, including one or more post-translational modifications of that sequence. In a particular embodiment, the VL comprises one, two or three CDRs selected from: a. CDR-L1, comprising the amino acid sequence SEQ ID NO: 861, b. CDR-L2, comprising the amino acid sequence SEQ ID NO: 1403, and c. CDR-L3, comprising the amino acid sequence SEQ ID NO: 1945.

[1209] In one aspect, an antibody or antigen-binding fragment thereof is provided, wherein the antibody or antigen-binding fragment thereof comprises a VH as in any of the embodiments provided above, and a VL as in any of the embodiments provided above. In some embodiments, the antibody or antigen-binding fragment thereof comprises the VH amino acid sequence of SEQ ID NO: 48, and the VL amino acid sequence of SEQ ID NO: 319, optionally including post-translational modifications of those sequences.

### TBRE1036

[1210] In one aspect, the present disclosure provides an antibody or antigen-binding fragment thereof comprising at least one or both variable regions selected from: a. VH comprising the amino acid sequence of SEQ ID NO: 49 and b. VL comprising the amino acid sequence of SEQ ID NO: 320.

[1211] In one aspect, the present disclosure provides an antibody or antigen-binding fragment thereof comprising at least one, two, three, four, five, or six CDRs selected from: a. CDR-H1 comprising the amino acid sequence of SEQ ID NO: 591, b. CDR-H2 comprising the amino acid sequence of SEQ ID NO: 1133, c. CDR-H3 comprising the amino acid sequence of SEQ ID NO: 1675, d. CDR-L1 comprising the amino acid sequence of SEQ ID NO: 862, e. CDR-L2 comprising the amino acid sequence of SEQ ID NO: 1404, and f. CDR-L3 comprising the amino acid sequence of SEQ ID NO: 1946.

[1212] In one aspect, the present disclosure provides an antibody or antigen-binding fragment thereof comprising: a. CDR-H1 comprising the amino acid sequence of SEQ ID NO: 591, b. CDR-H2 comprising the amino acid sequence of SEQ ID NO: 1133, c. CDR-H3 comprising the amino acid sequence of SEQ ID NO: 1675, d. CDR-L1 comprising the amino acid sequence of SEQ ID NO: 862, e. CDR-L2 comprising the amino acid sequence of SEQ ID NO: 1404, and f. CDR-L3 comprising the amino acid sequence of SEQ ID NO: 1946. In one aspect, the present disclosure provides an antibody or antigen-binding fragment thereof comprising a CDR-H3 comprising the amino acid sequence of SEQ ID NO: 1675, and a CDR-L3 comprising the amino acid sequence of SEQ ID NO: 1946.

[1213] In one aspect, the present disclosure provides an antibody or antigen-binding fragment thereof comprising at least one, at least two, or all three VH CDR sequences selected from: a. CDR-H1 comprising the amino acid sequence of SEQ ID NO: 591, b. CDR-H2 comprising the amino acid sequence of SEQ ID NO: 1133, c. CDR-H3 comprising the amino acid sequence of SEQ ID NO: 1675, and a VL comprising the amino acid sequence of SEQ ID NO: 320.

[1214] In one aspect, the present disclosure provides an antibody or antigen-binding fragment thereof comprising at least one, at least two, or all three VL CDR sequences selected from: a. CDR-L1 comprising the amino acid sequence of SEQ ID NO: 862, b. CDR-L2 comprising the amino acid sequence of SEQ ID NO: 1404, c. CDR-L3 comprising the amino acid sequence of SEQ ID NO: 1946, and a VH comprising the amino acid sequence of SEQ ID NO: 49.

[1215] In one aspect, an antibody or antigen-binding fragment thereof is provided, wherein the antibody or antigen-binding fragment thereof comprises a heavy chain variable domain (VH) having at least 90%, 91%, 92%, 93%, 94%, 95%, 96%, 97%, 98%, 99%, or 100% sequence identity to the amino acid sequence SEQ ID NO: 49. In some embodiments, a VH sequence having at least 90%, 91%, 92%, 93%, 94%, 95%, 96%, 97%, 98%, or 99% identity contains substitutions (e.g., conservative substitutions), insertions, or deletions relative to the reference sequence, but an antibody or antigen-binding fragment thereof comprising that sequence retains the ability to bind to same antigen as of the parent (e.g., cancer associated antigen). In some embodiments, a total of 1 to 10 amino acids have been substituted, inserted and/or deleted in the amino acid sequence SEQ ID NO: 49. In some embodiments, substitutions, insertions, or deletions occur in regions outside the CDRs (e.g., in the FRs). Optionally, the antibody or antigen-binding fragment thereof comprises the VH sequence SEQ ID NO: 49, including one or more post-translational modifications of that sequence. In a particular embodiment, the VH comprises one, two or three CDRs selected from: a. CDR-H1, comprising the amino acid sequence SEQ ID NO: 591, b. CDR-H2, comprising the amino acid sequence SEQ ID NO: 1133, and c. CDR-H3, comprising the amino acid sequence SEQ ID NO: 1675.

[1216] In one aspect, an antibody or antigen-binding fragment thereof is provided, wherein the antibody or antigen-binding fragment thereof comprises a light chain variable domain (VL) having at least 90%, 91%, 92%, 93%, 94%, 95%, 96%, 97%, 98%, 99%, or 100% sequence identity to the amino acid sequence SEQ ID NO: 320. In some embodiments, a VL sequence having at least 90%, 91%, 92%, 93%, 94%, 95%, 96%, 97%, 98%, or 99% identity contains substitutions (e.g., conservative substitutions), insertions, or deletions relative to the reference sequence, but an antibody or antigen-binding fragment thereof comprising that sequence retains the ability to bind to same antigen as the parent (e.g., cancer associated antigen). In some embodiments, a total of 1 to 10 amino acids have been substituted, inserted and/or deleted in the amino acid sequence SEQ ID NO: 320. In some embodiments, the substitutions, insertions, or deletions occur in regions outside the CDRs (e.g., in the FRs). Optionally, the antibody or antigen-binding fragment thereof comprises the VL sequence SEQ ID NO: 320, including one or more post-translational modifications of that sequence. In a particular embodiment, the VL comprises one, two or three CDRs selected from: a. CDR-L1, comprising the amino acid sequence SEQ ID NO: 862, b. CDR-L2, comprising the amino acid sequence SEQ ID NO: 1404, and c. CDR-L3, comprising the amino acid sequence SEQ ID NO: 1946.

[1217] In one aspect, an antibody or antigen-binding fragment thereof is provided, wherein the antibody or antigen-binding fragment thereof comprises a VH as in any of the embodiments provided above, and a VL as in any of the embodiments provided above. In some embodiments, the antibody or antigen-binding fragment thereof comprises the VH amino acid sequence of SEQ ID NO: 49, and the VL amino acid sequence of SEQ ID NO: 320, optionally including post-translational modifications of those sequences.

### TBRE1037

[1218] In one aspect, the present disclosure provides an antibody or antigen-binding fragment thereof comprising at least one or both variable regions selected from: a. VH comprising the amino acid sequence of SEQ ID NO: 50 and b. VL comprising the amino acid sequence of SEQ ID NO: 321.

[1219] In one aspect, the present disclosure provides an antibody or antigen-binding fragment thereof comprising at least one, two, three, four, five, or six CDRs selected from: a. CDR-H1 comprising the amino acid sequence of SEQ ID NO: 592, b. CDR-H2 comprising the amino acid sequence of SEQ ID NO: 1134, c. CDR-H3 comprising the amino acid sequence of SEQ ID NO: 1676, d. CDR-L1 comprising the amino acid sequence of SEQ ID NO: 863, e. CDR-L2 comprising the amino acid sequence of SEQ ID NO: 1405, and f. CDR-L3 comprising the amino acid sequence of SEQ ID NO: 1947.

[1220] In one aspect, the present disclosure provides an antibody or antigen-binding fragment thereof comprising: a. CDR-H1 comprising the amino acid sequence of SEQ ID NO: 592, b. CDR-H2 comprising the amino acid sequence of SEQ ID NO: 1134, c. CDR-H3 comprising the amino acid sequence of SEQ ID NO: 1676, d. CDR-L1 comprising the amino acid sequence of SEQ ID NO: 863, e. CDR-L2 comprising the amino acid sequence of SEQ ID NO: 1405, and f. CDR-L3 comprising the amino acid sequence of SEQ ID NO: 1947. In one aspect, the present disclosure provides an antibody or antigen-binding fragment thereof comprising a CDR-H3 comprising the amino acid sequence of SEQ ID NO: 1676, and a CDR-L3 comprising the amino acid sequence of SEQ ID NO: 1947.

[1221] In one aspect, the present disclosure provides an antibody or antigen-binding fragment thereof comprising at least one, at least two, or all three VH CDR sequences selected from: a. CDR-H1 comprising the amino acid sequence of SEQ ID NO: 592, b. CDR-H2 comprising the amino acid sequence of SEQ ID NO: 1134, c. CDR-H3 comprising the amino acid sequence of SEQ ID NO: 1676, and a VL comprising the amino acid sequence of SEQ ID NO: 321.

[1222] In one aspect, the present disclosure provides an antibody or antigen-binding fragment thereof comprising at least one, at least two, or all three VL CDR sequences selected from: a. CDR-L1 comprising the amino acid sequence of SEQ ID NO: 863, b. CDR-L2 comprising the amino acid sequence of SEQ ID NO: 1405, c. CDR-L3 comprising the amino acid sequence of SEQ ID NO: 1947, and a VH comprising the amino acid sequence of SEQ ID NO: 50.

[1223] In one aspect, an antibody or antigen-binding fragment thereof is provided, wherein the antibody or antigen-binding fragment thereof comprises a heavy chain variable domain (VH) having at least 90%, 91%, 92%, 93%, 94%, 95%, 96%, 97%, 98%, 99%, or 100% sequence identity to the amino acid sequence SEQ ID NO: 50. In some embodiments, a VH sequence having at least 90%, 91%, 92%, 93%, 94%, 95%, 96%, 97%, 98%, or 99% identity contains substitutions (e.g., conservative substitutions), insertions, or deletions relative to the reference sequence, but an antibody or antigen-binding fragment thereof comprising that sequence retains the ability to bind to same antigen as of the parent (e.g., cancer associated antigen). In some embodiments, a total of 1 to 10 amino acids have been substituted, inserted and/or deleted in the amino acid sequence SEQ ID NO: 50. In some embodiments, substitutions, insertions, or deletions occur in regions outside the CDRs (e.g., in the FRs). Optionally, the antibody or antigen-binding fragment thereof comprises the VH sequence SEQ ID NO: 50, including one or more post-translational modifications of that sequence. In a particular embodiment, the VH comprises one, two or three CDRs selected from: a. CDR-H1, comprising the amino acid sequence SEQ ID NO: 592, b. CDR-H2, comprising the amino acid sequence SEQ ID NO: 1134, and c. CDR-H3, comprising the amino acid sequence SEQ ID NO: 1676.

[1224] In one aspect, an antibody or antigen-binding fragment thereof is provided, wherein the antibody or antigen-binding fragment thereof comprises a light chain variable domain (VL) having at least 90%, 91%, 92%, 93%, 94%, 95%, 96%, 97%, 98%, 99%, or 100% sequence identity to the amino acid sequence SEQ ID NO: 321. In some embodiments, a VL sequence having at least 90%, 91%, 92%, 93%, 94%, 95%, 96%, 97%, 98%, or 99% identity contains substitutions (e.g., conservative substitutions), insertions, or deletions relative to the reference sequence, but an antibody or antigen-binding fragment thereof comprising that sequence retains the ability to bind to same antigen as the parent (e.g., cancer associated antigen). In some embodiments, a total of 1 to 10 amino acids have been substituted, inserted and/or deleted in the amino acid sequence SEQ ID NO: 321. In some embodiments, the substitutions, insertions, or deletions occur in regions outside the CDRs (e.g., in the FRs). Optionally, the antibody or antigen-binding fragment thereof comprises the VL sequence SEQ ID NO: 321, including one or more post-translational modifications of that sequence. In a particular embodiment, the VL comprises one, two or three CDRs selected from: a. CDR-L1, comprising the amino acid sequence SEQ ID NO: 863, b. CDR-L2, comprising the amino acid sequence SEQ ID NO: 1405, and c. CDR-L3, comprising the amino acid sequence SEQ ID NO: 1947.

[1225] In one aspect, an antibody or antigen-binding fragment thereof is provided, wherein the antibody or antigen-binding fragment thereof comprises a VH as in any of the embodiments provided above, and a VL as in any of the embodiments provided above. In some embodiments, the antibody or antigen-binding fragment thereof comprises the VH amino acid sequence of SEQ ID NO: 50, and the VL amino acid sequence of SEQ ID NO: 321, optionally including post-translational modifications of those sequences.

### TBRE1038

[1226] In one aspect, the present disclosure provides an antibody or antigen-binding fragment thereof comprising at least one or both variable regions selected from: a. VH comprising the amino acid sequence of SEQ ID NO: 51 and b. VL comprising the amino acid sequence of SEQ ID NO: 322.

[1227] In one aspect, the present disclosure provides an antibody or antigen-binding fragment thereof comprising at least one, two, three, four, five, or six CDRs selected from: a. CDR-H1 comprising the amino acid sequence of SEQ ID NO: 593, b. CDR-H2 comprising the amino acid sequence of SEQ ID NO: 1135, c. CDR-H3 comprising the amino acid sequence of SEQ ID NO: 1677, d. CDR-L1 comprising the amino acid sequence of SEQ ID NO: 864, e. CDR-L2 comprising the amino acid sequence of SEQ ID NO: 1406, and f. CDR-L3 comprising the amino acid sequence of SEQ ID NO: 1948.

[1228] In one aspect, the present disclosure provides an antibody or antigen-binding fragment thereof comprising: a. CDR-H1 comprising the amino acid sequence of SEQ ID NO: 593, b. CDR-H2 comprising the amino acid sequence of SEQ ID NO: 1135, c. CDR-H3 comprising the amino acid sequence of SEQ ID NO: 1677, d. CDR-L1 comprising the amino acid sequence of SEQ ID NO: 864, e. CDR-L2 comprising the amino acid sequence of SEQ ID NO: 1406, and f. CDR-L3 comprising the amino acid sequence of SEQ ID NO: 1948. In one aspect, the present disclosure provides an antibody or antigen-binding fragment thereof comprising a CDR-H3 comprising the amino acid sequence of SEQ ID NO: 1677, and a CDR-L3 comprising the amino acid sequence of SEQ ID NO: 1948.

[1229] In one aspect, the present disclosure provides an antibody or antigen-binding fragment thereof comprising at least one, at least two, or all three VH CDR sequences selected from: a. CDR-H1 comprising the amino acid sequence of SEQ ID NO: 593, b. CDR-H2 comprising the amino acid sequence of SEQ ID NO: 1135, c. CDR-H3 comprising the amino acid sequence of SEQ ID NO: 1677, and a VL comprising the amino acid sequence of SEQ ID NO: 322.

[1230] In one aspect, the present disclosure provides an antibody or antigen-binding fragment thereof comprising at least one, at least two, or all three VL CDR sequences selected from: a. CDR-L1 comprising the amino acid sequence of SEQ ID NO: 864, b. CDR-L2 comprising the amino acid sequence of SEQ ID NO: 1406, c. CDR-L3 comprising the amino acid sequence of SEQ ID NO: 1948, and a VH comprising the amino acid sequence of SEQ ID NO: 51.

[1231] In one aspect, an antibody or antigen-binding fragment thereof is provided, wherein the antibody or antigen-binding fragment thereof comprises a heavy chain variable domain (VH) having at least 90%, 91%, 92%, 93%, 94%, 95%, 96%, 97%, 98%, 99%, or 100% sequence identity to the amino acid sequence SEQ ID NO: 51. In some embodiments, a VH sequence having at least 90%, 91%, 92%, 93%, 94%, 95%, 96%, 97%, 98%, or 99% identity contains substitutions (e.g., conservative substitutions), thereof comprising that sequence retains the ability to bind to same antigen as of the parent (e.g., cancer associated antigen). In some embodiments, a total of 1 to 10 amino acids have been substituted, inserted and/or deleted in the amino acid sequence SEQ ID NO: 51. In some embodiments, substitutions, insertions, or deletions occur in regions outside the CDRs (e.g., in the FRs). Optionally, the antibody or antigen-binding fragment thereof comprises the VH sequence SEQ ID NO: 51, including one or more post-translational modifications of that sequence. In a particular embodiment, the VH comprises one, two or three CDRs selected from: a. CDR-H1, comprising the amino acid sequence SEQ ID NO: 593, b. CDR-H2, comprising the amino acid sequence SEQ ID NO: 1135, and c. CDR-H3, comprising the amino acid sequence SEQ ID NO: 1677.

[1232] In one aspect, an antibody or antigen-binding fragment thereof is provided, wherein the antibody or antigen-binding fragment thereof comprises a light chain variable domain (VL) having at least 90%, 91%, 92%, 93%, 94%, 95%, 96%, 97%, 98%, 99%, or 100% sequence identity to the amino acid sequence SEQ ID NO: 322. In some embodiments, a VL sequence having at least 90%, 91%, 92%, 93%, 94%, 95%, 96%, 97%, 98%, or 99% identity contains substitutions (e.g., conservative substitutions), insertions, or deletions relative to the reference sequence, but an antibody or antigen-binding fragment thereof comprising that sequence retains the ability to bind to same antigen as the parent (e.g., cancer associated antigen). In some embodiments, a total of 1 to 10 amino acids have been substituted, inserted and/or deleted in the amino acid sequence SEQ ID NO: 322. In some embodiments, the substitutions, insertions, or deletions occur in regions outside the CDRs (e.g., in the FRs). Optionally, the antibody or antigen-binding fragment thereof comprises the VL sequence SEQ ID NO: 322, including one or more post-translational modifications of that sequence. In a particular embodiment, the VL comprises one, two or three CDRs selected from: a. CDR-L1, comprising the amino acid sequence SEQ ID NO: 864, b. CDR-L2, comprising the amino acid sequence SEQ ID NO: 1406, and c. CDR-L3, comprising the amino acid sequence SEQ ID NO: 1948.

[1233] In one aspect, an antibody or antigen-binding fragment thereof is provided, wherein the antibody or antigen-binding fragment thereof comprises a VH as in any of the embodiments provided above, and a VL as in any of the embodiments provided above. In some embodiments, the antibody or antigen-binding fragment thereof comprises the VH amino acid sequence of SEQ ID NO: 51, and the VL amino acid sequence of SEQ ID NO: 322, optionally including post-translational modifications of those sequences.

### TBRE1039

[1234] In one aspect, the present disclosure provides an antibody or antigen-binding fragment thereof comprising at least one or both variable regions selected from: a. VH comprising the amino acid sequence of SEQ ID NO: 52 and b. VL comprising the amino acid sequence of SEQ ID NO: 323.

[1235] In one aspect, the present disclosure provides an antibody or antigen-binding fragment thereof comprising at least one, two, three, four, five, or six CDRs selected from: a. CDR-H1 comprising the amino acid sequence of SEQ ID NO: 594, b. CDR-H2 comprising the amino acid sequence of SEQ ID NO: 1136, c. CDR-H3 comprising the amino acid sequence of SEQ ID NO: 1678, d. CDR-L1 comprising the amino acid sequence of SEQ ID NO: 865, e. CDR-L2 comprising the amino acid sequence of SEQ ID NO: 1407, and f. CDR-L3 comprising the amino acid sequence of SEQ ID NO: 1949. In one aspect, the present disclosure provides an antibody or antigen-binding fragment thereof comprising: a. CDR-H1 comprising the amino acid sequence of SEQ ID NO: 594, b. CDR-H2 comprising the amino acid sequence of SEQ ID NO: 1136, c. CDR-H3 comprising the amino acid sequence of SEQ ID NO: 1678, d. CDR-L1 comprising the amino acid sequence of SEQ ID NO: 865, e. CDR-L2 comprising the amino acid sequence of SEQ ID NO: 1407, and f. CDR-L3 comprising the amino acid sequence of SEQ ID NO: 1949. In one aspect, the present disclosure provides an antibody or antigen-binding fragment thereof comprising a CDR-H3 comprising the amino acid sequence of SEQ ID NO: 1678 and a f. CDR-L3 comprising the amino acid sequence of SEQ ID NO: 1949.

[1236] In one aspect, the present disclosure provides an antibody or antigen-binding fragment thereof comprising at least one, at least two, or all three VH CDR sequences selected from: a. CDR-H1 comprising the amino acid sequence of SEQ ID NO: 594, b. CDR-H2 comprising the amino acid sequence of SEQ ID NO: 1136, c. CDR-H3 comprising the amino acid sequence of SEQ ID NO: 1678, and a VL comprising the amino acid sequence of SEQ ID NO: 323.

[1237] In one aspect, the present disclosure provides an antibody or antigen-binding fragment thereof comprising at least one, at least two, or all three VL CDR sequences selected from: a. CDR-L1 comprising the amino acid sequence of SEQ ID NO: 865, b. CDR-L2 comprising the amino acid sequence of SEQ ID NO: 1407, c. CDR-L3 comprising the amino acid sequence of SEQ ID NO: 1949, and a VH comprising the amino acid sequence of SEQ ID NO: 52.

[1238] In one aspect, an antibody or antigen-binding fragment thereof is provided, wherein the antibody or antigen-binding fragment thereof comprises a heavy chain variable domain (VH) having at least 90%, 91%, 92%, 93%, 94%, 95%, 96%, 97%, 98%, 99%, or 100% sequence identity to the amino acid sequence SEQ ID NO: 52. In some embodiments, a VH sequence having at least 90%, 91%, 92%, 93%, 94%, 95%, 96%, 97%, 98%, or 99% identity contains substitutions (e.g., conservative substitutions), insertions, or deletions relative to the reference sequence, but an antibody or antigen-binding fragment thereof comprising that sequence retains the ability to bind to same antigen as of the parent (e.g., cancer associated antigen). In some embodiments, a total of 1 to 10 amino acids have been substituted, inserted and/or deleted in the amino acid sequence SEQ ID NO: 52. In some embodiments, substitutions, insertions, or deletions occur in regions outside the CDRs (e.g., in the FRs). Optionally, the antibody or antigen-binding fragment thereof comprises the VH sequence SEQ ID NO: 52, including one or more post-translational modifications of that sequence. In a particular embodiment, the VH comprises one, two or three CDRs selected from: a. CDR-H1, comprising the amino acid sequence SEQ ID NO: 594, b. CDR-H2, comprising the amino acid sequence SEQ ID NO: 1136, and c. CDR-H3, comprising the amino acid sequence SEQ ID NO: 1678.

[1239] In one aspect, an antibody or antigen-binding fragment thereof is provided, wherein the antibody or antigen-binding fragment thereof comprises a light chain variable domain (VL) having at least 90%, 91%, 92%, 93%, 94%, 95%, 96%, 97%, 98%, 99%, or 100% sequence identity to the amino acid sequence SEQ ID NO: 323. In some embodiments, a VL sequence having at least 90%, 91%, 92%, 93%, 94%, 95%, 96%, 97%, 98%, or 99% identity contains substitutions (e.g., conservative substitutions), insertions, or deletions relative to the reference sequence, but an antibody or antigen-binding fragment thereof comprising that sequence retains the ability to bind to same antigen as the parent (e.g., cancer associated antigen). In some embodiments, a total of 1 to 10 amino acids have been substituted, inserted and/or deleted in the amino acid sequence SEQ ID NO: 323. In some embodiments, the substitutions, insertions, or deletions occur in regions outside the CDRs (e.g., in the FRs). Optionally, the antibody or antigen-binding fragment thereof comprises the VL sequence SEQ ID NO: 323, including one or more post-translational modifications of that sequence. In a particular embodiment, the VL comprises one, two or three CDRs selected from: a. CDR-L1, comprising the amino acid sequence SEQ ID NO: 865, b. CDR-L2, comprising the amino acid sequence SEQ ID NO: 1407, and c. CDR-L3, comprising the amino acid sequence SEQ ID NO: 1949.

[1240] In one aspect, an antibody or antigen-binding fragment thereof is provided, wherein the antibody or antigen-binding fragment thereof comprises a VH as in any of the embodiments provided above, and a VL as in any of the embodiments provided above. In some embodiments, the antibody or antigen-binding fragment thereof comprises the VH amino acid sequence of SEQ ID NO: 52, and the VL amino acid sequence of SEQ ID NO: 323, optionally including post-translational modifications of those sequences.

### TBRE1040

[1241] In one aspect, the present disclosure provides an antibody or antigen-binding fragment thereof comprising at least one or both variable regions selected from: a. VH comprising the amino acid sequence of SEQ ID NO: 53 and b. VL comprising the amino acid sequence of SEQ ID NO: 324.

[1242] In one aspect, the present disclosure provides an antibody or antigen-binding fragment thereof comprising at least one, two, three, four, five, or six CDRs selected from: a. CDR-H1 comprising the amino acid sequence of SEQ ID NO: 595, b. CDR-H2 comprising the amino acid sequence of SEQ ID NO: 1137, c. CDR-H3 comprising the amino acid sequence of SEQ ID NO: 1679, d. CDR-L1 comprising the amino acid sequence of SEQ ID NO: 866, e. CDR-L2 comprising the amino acid sequence of SEQ ID NO: 1408, and f. CDR-L3 comprising the amino acid sequence of SEQ ID NO: 1950.

[1243] In one aspect, the present disclosure provides an antibody or antigen-binding fragment thereof comprising: a. CDR-H1 comprising the amino acid sequence of SEQ ID NO: 595, b. CDR-H2 comprising the amino acid sequence of SEQ ID NO: 1137, c. CDR-H3 comprising the amino acid sequence of SEQ ID NO: 1679, d. CDR-L1 comprising the amino acid sequence of SEQ ID NO: 866, e. CDR-L2 comprising the amino acid sequence of SEQ ID NO: 1408, and f. CDR-L3 comprising the amino acid sequence of SEQ ID NO: 1950. In one aspect, the present disclosure provides an antibody or antigen-binding fragment thereof comprising a CDR-H3 comprising the amino acid sequence of SEQ ID NO: 1679, and a CDR-L3 comprising the amino acid sequence of SEQ ID NO: 1950.

[1244] In one aspect, the present disclosure provides an antibody or antigen-binding fragment thereof comprising at least one, at least two, or all three VH CDR sequences selected from: a. CDR-H1 comprising the amino acid sequence of SEQ ID NO: 595, b. CDR-H2 comprising the amino acid sequence of SEQ ID NO: 1137, c. CDR-H3 comprising the amino acid sequence of SEQ ID NO: 1679, and a VL comprising the amino acid sequence of SEQ ID NO: 324.

[1245] In one aspect, the present disclosure provides an antibody or antigen-binding fragment thereof comprising at least one, at least two, or all three VL CDR sequences selected from: a. CDR-L1 comprising the amino acid sequence of SEQ ID NO: 866, b. CDR-L2 comprising the amino acid sequence of SEQ ID NO: 1408, c. CDR-L3 comprising the amino acid sequence of SEQ ID NO: 1950, and a VH comprising the amino acid sequence of SEQ ID NO: 53.

[1246] In one aspect, an antibody or antigen-binding fragment thereof is provided, wherein the antibody or antigen-binding fragment thereof comprises a heavy chain variable domain (VH) having at least 90%, 91%, 92%, 93%, 94%, 95%, 96%, 97%, 98%, 99%, or 100% sequence identity to the amino acid sequence SEQ ID NO: 53. In some embodiments, a VH sequence having at least 90%, 91%, 92%, 93%, 94%, 95%, 96%, 97%, 98%, or 99% identity contains substitutions (e.g., conservative substitutions), insertions, or deletions relative to the reference sequence, but an antibody or antigen-binding fragment thereof comprising that sequence retains the ability to bind to same antigen as of the parent (e.g., cancer associated antigen). In some embodiments, a total of 1 to 10 amino acids have been substituted, inserted and/or deleted in the amino acid sequence SEQ ID NO: 53. In some embodiments, substitutions, insertions, or deletions occur in regions outside the CDRs (e.g., in the FRs). Optionally, the antibody or antigen-binding fragment thereof comprises the VH sequence SEQ ID NO: 53, including one or more post-translational modifications of that sequence. In a particular embodiment, the VH comprises one, two or three CDRs selected from: a. CDR-H1, comprising the amino acid sequence SEQ ID NO: 595, b. CDR-H2, comprising the amino acid sequence SEQ ID NO: 1137, and a CDR-H3, comprising the amino acid sequence SEQ ID NO: 1679.

[1247] In one aspect, an antibody or antigen-binding fragment thereof is provided, wherein the antibody or antigen-binding fragment thereof comprises a light chain variable domain (VL) having at least 90%, 91%, 92%, 93%, 94%, 95%, 96%, 97%, 98%, 99%, or 100% sequence identity to the amino acid sequence SEQ ID NO: 324. In some embodiments, a VL sequence having at least 90%, 91%, 92%, 93%, 94%, 95%, 96%, 97%, 98%, or 99% identity contains substitutions (e.g., conservative substitutions), insertions, or deletions relative to the reference sequence, but an antibody or antigen-binding fragment thereof comprising that sequence retains the ability to bind to same antigen as the parent (e.g., cancer associated antigen). In some embodiments, a total of 1 to 10 amino acids have been substituted, inserted and/or deleted in the amino acid sequence SEQ ID NO: 324. In some embodiments, the substitutions, insertions, or deletions occur in regions outside the CDRs (e.g., in the FRs). Optionally, the antibody or antigen-binding fragment thereof comprises the VL sequence SEQ ID NO: 324, including one or more post-translational modifications of that sequence. In a particular embodiment, the VL comprises one, two or three CDRs selected from: a. CDR-L1, comprising the amino acid sequence SEQ ID NO: 866, b. CDR-L2, comprising the amino acid sequence SEQ ID NO: 1408, and c. CDR-L3, comprising the amino acid sequence SEQ ID NO: 1950.

[1248] In one aspect, an antibody or antigen-binding fragment thereof is provided, wherein the antibody or antigen-binding fragment thereof comprises a VH as in any of the embodiments provided above, and a VL as in any of the embodiments provided above. In some embodiments, the antibody or antigen-binding fragment thereof comprises the VH amino acid sequence of SEQ ID NO: 53, and the VL amino acid sequence of SEQ ID NO: 324, optionally including post-translational modifications of those sequences.

### TBRE1041

[1249] In one aspect, the present disclosure provides an antibody or antigen-binding fragment thereof comprising at least one or both variable regions selected from: a. VH comprising the amino acid sequence of SEQ ID NO: 54 and b. VL comprising the amino acid sequence of SEQ ID NO: 325.

[1250] In one aspect, the present disclosure provides an antibody or antigen-binding fragment thereof comprising at least one, two, three, four, five, or six CDRs selected from: a. CDR-H1 comprising the amino acid sequence of SEQ ID NO: 596, b. CDR-H2 comprising the amino acid sequence of SEQ ID NO: 1138, c. CDR-H3 comprising the amino acid sequence of SEQ ID NO: 1680, d. CDR-L1 comprising the amino acid sequence of SEQ ID NO: 867, e. CDR-L2 comprising the amino acid sequence of SEQ ID NO: 1409, and f. CDR-L3 comprising the amino acid sequence of SEQ ID NO: 1951.

[1251] In one aspect, the present disclosure provides an antibody or antigen-binding fragment thereof comprising: a. CDR-H1 comprising the amino acid sequence of SEQ ID NO: 596, b. CDR-H2 comprising the amino acid sequence of SEQ ID NO: 1138, c. CDR-H3 comprising the amino acid sequence of SEQ ID NO: 1680, d. CDR-L1 comprising the amino acid sequence of SEQ ID NO: 867, e. CDR-L2 comprising the amino acid sequence of SEQ ID NO: 1409, and f. CDR-L3 comprising the amino acid sequence of SEQ ID NO: 1951. In one aspect, the present disclosure provides an antibody or antigen-binding fragment thereof comprising a CDR-H3 comprising the amino acid sequence of SEQ ID NO: 1680, and a CDR-L3 comprising the amino acid sequence of SEQ ID NO: 1951.

[1252] In one aspect, the present disclosure provides an antibody or antigen-binding fragment thereof comprising at least one, at least two, or all three VH CDR sequences selected from: a. CDR-H1 comprising the amino acid sequence of SEQ ID NO: 596, b. CDR-H2 comprising the amino acid sequence of SEQ ID NO: 1138, c. CDR-H3 comprising the amino acid sequence of SEQ ID NO: 1680, and a VL comprising the amino acid sequence of SEQ ID NO: 325.

[1253] In one aspect, the present disclosure provides an antibody or antigen-binding fragment thereof comprising at least one, at least two, or all three VL CDR sequences selected from: a. CDR-L1 comprising the amino acid sequence of SEQ ID NO: 867, b. CDR-L2 comprising the amino acid sequence of SEQ ID NO: 1409, c. CDR-L3 comprising the amino acid sequence of SEQ ID NO: 1951, and a VH comprising the amino acid sequence of SEQ ID NO: 54.

[1254] In one aspect, an antibody or antigen-binding fragment thereof is provided, wherein the antibody or antigen-binding fragment thereof comprises a heavy chain variable domain (VH) having at least 90%, 91%, 92%, 93%, 94%, 95%, 96%, 97%, 98%, 99%, or 100% sequence identity to the amino acid sequence SEQ ID NO: 54. In some embodiments, a VH sequence having at least 90%, 91%, 92%, 93%, 94%, 95%, 96%, 97%, 98%, or 99% identity contains substitutions (e.g., conservative substitutions), thereof comprising that sequence retains the ability to bind to same antigen as of the parent (e.g., cancer associated antigen). In some embodiments, a total of 1 to 10 amino acids have been substituted, inserted and/or deleted in the amino acid sequence SEQ ID NO: 54. In some embodiments, substitutions, insertions, or deletions occur in regions outside the CDRs (e.g., in the FRs). Optionally, the antibody or antigen-binding fragment thereof comprises the VH sequence SEQ ID NO: 54, including one or more post-translational modifications of that sequence. In a particular embodiment, the VH comprises one, two or three CDRs selected from: a CDR-H1, comprising the amino acid sequence SEQ ID NO: 596, b. CDR-H2, comprising the amino acid sequence SEQ ID NO: 1138, and c. CDR-H3, comprising the amino acid sequence SEQ ID NO: 1680.

[1255] In one aspect, an antibody or antigen-binding fragment thereof is provided, wherein the antibody or antigen-binding fragment thereof comprises a light chain variable domain (VL) having at least 90%, 91%, 92%, 93%, 94%, 95%, 96%, 97%, 98%, 99%, or 100% sequence identity to the amino acid sequence SEQ ID NO: 325. In some embodiments, a VL sequence having at least 90%, 91%, 92%, 93%, 94%, 95%, 96%, 97%, 98%, or 99% identity contains substitutions (e.g., conservative substitutions), insertions, or deletions relative to the reference sequence, but an antibody or antigen-binding fragment thereof comprising that sequence retains the ability to bind to same antigen as the parent (e.g., cancer associated antigen). In some embodiments, a total of 1 to 10 amino acids have been substituted, inserted and/or deleted in the amino acid sequence SEQ ID NO: 325. In some embodiments, the substitutions, insertions, or deletions occur in regions outside the CDRs (e.g., in the FRs). Optionally, the antibody or antigen-binding fragment thereof comprises the VL sequence SEQ ID NO: 325, including one or more post-translational modifications of that sequence. In a particular embodiment, the VL comprises one, two or three CDRs selected from: a. CDR-L1, comprising the amino acid sequence SEQ ID NO: 867, b. CDR-L2, comprising the amino acid sequence SEQ ID NO: 1409, and c. CDR-L3, comprising the amino acid sequence SEQ ID NO: 1951.

[1256] In one aspect, an antibody or antigen-binding fragment thereof is provided, wherein the antibody or antigen-binding fragment thereof comprises a VH as in any of the embodiments provided above, and a VL as in any of the embodiments provided above. In some embodiments, the antibody or antigen-binding fragment thereof comprises the VH amino acid sequence of SEQ ID NO: 54, and the VL amino acid sequence of SEQ ID NO: 325, optionally including post-translational modifications of those sequences.

### TBRE1042

[1257] In one aspect, the present disclosure provides an antibody or antigen-binding fragment thereof comprising at least one or both variable regions selected from: a. VH comprising the amino acid sequence of SEQ ID NO: 55 and b. VL comprising the amino acid sequence of SEQ ID NO: 326.

[1258] In one aspect, the present disclosure provides an antibody or antigen-binding fragment thereof comprising at least one, two, three, four, five, or six CDRs selected from: a. CDR-H1 comprising the amino acid sequence of SEQ ID NO: 597, b. CDR-H2 comprising the amino acid sequence of SEQ ID NO: 1139, c. CDR-H3 comprising the amino acid sequence of SEQ ID NO: 1681, d. CDR-L1 comprising the amino acid sequence of SEQ ID NO: 868, e. CDR-L2 comprising the amino acid sequence of SEQ ID NO: 1410, and f. CDR-L3 comprising the amino acid sequence of SEQ ID NO: 1952.

[1259] In one aspect, the present disclosure provides an antibody or antigen-binding fragment thereof comprising: a. CDR-H1 comprising the amino acid sequence of SEQ ID NO: 597, b. CDR-H2 comprising the amino acid sequence of SEQ ID NO: 1139, c. CDR-H3 comprising the amino acid sequence of SEQ ID NO: 1681, d. CDR-L1 comprising the amino acid sequence of SEQ ID NO: 868, e. CDR-L2 comprising the amino acid sequence of SEQ ID NO: 1410, and f. CDR-L3 comprising the amino acid sequence of SEQ ID NO: 1952. In one aspect, the present disclosure provides an antibody or antigen-binding fragment thereof comprising a CDR-H3 comprising the amino acid sequence of SEQ ID NO: 1681, and a CDR-L3 comprising the amino acid sequence of SEQ ID NO: 1952.

[1260] In one aspect, the present disclosure provides an antibody or antigen-binding fragment thereof comprising at least one, at least two, or all three VH CDR sequences selected from: a. CDR-H1 comprising the amino acid sequence of SEQ ID NO: 597, b. CDR-H2 comprising the amino acid sequence of SEQ ID NO: 1139, c. CDR-H3 comprising the amino acid sequence of SEQ ID NO: 1681, and a VL comprising the amino acid sequence of SEQ ID NO: 326.

[1261] In one aspect, the present disclosure provides an antibody or antigen-binding fragment thereof comprising at least one, at least two, or all three VL CDR sequences selected from: a. CDR-L1 comprising the amino acid sequence of SEQ ID NO: 868, b. CDR-L2 comprising the amino acid sequence of SEQ ID NO: 1410, c. CDR-L3 comprising the amino acid sequence of SEQ ID NO: 1952, and a VH comprising the amino acid sequence of SEQ ID NO: 55.

[1262] In one aspect, an antibody or antigen-binding fragment thereof is provided, wherein the antibody or antigen-binding fragment thereof comprises a heavy chain variable domain (VH) having at least 90%, 91%, 92%, 93%, 94%, 95%, 96%, 97%, 98%, 99%, or 100% sequence identity to the amino acid sequence SEQ ID NO: 55. In some embodiments, a VH sequence having at least 90%, 91%, 92%, 93%, 94%, 95%, 96%, 97%, 98%, or 99% identity contains substitutions (e.g., conservative substitutions), insertions, or deletions relative to the reference sequence, but an antibody or antigen-binding fragment thereof comprising that sequence retains the ability to bind to same antigen as of the parent (e.g., cancer associated antigen). In some embodiments, a total of 1 to 10 amino acids have been substituted, inserted and/or deleted in the amino acid sequence SEQ ID NO: 55. In some embodiments, substitutions, insertions, or deletions occur in regions outside the CDRs (e.g., in the FRs). Optionally, the antibody or antigen-binding fragment thereof comprises the VH sequence SEQ ID NO: 55, including one or more post-translational modifications of that sequence. In a particular embodiment, the VH comprises one, two or three CDRs selected from: a. CDR-H1, comprising the amino acid sequence SEQ ID NO: 597, b. CDR-H2, comprising the amino acid sequence SEQ ID NO: 1139, and c. CDR-H3, comprising the amino acid sequence SEQ ID NO: 1681.

[1263] In one aspect, an antibody or antigen-binding fragment thereof is provided, wherein the antibody or antigen-binding fragment thereof comprises a light chain variable domain (VL) having at least 90%, 91%, 92%, 93%, 94%, 95%, 96%, 97%, 98%, 99%, or 100% sequence identity to the amino acid sequence SEQ ID NO: 326. In some embodiments, a VL sequence having at least 90%, 91%, 92%, 93%, 94%, 95%, 96%, 97%, 98%, or 99% identity contains substitutions (e.g., conservative substitutions), insertions, or deletions relative to the reference sequence, but an antibody or antigen-binding fragment thereof comprising that sequence retains the ability to bind to same antigen as the parent (e.g., cancer associated antigen). In some embodiments, a total of 1 to 10 amino acids have been substituted, inserted and/or deleted in the amino acid sequence SEQ ID NO: 326. In some embodiments, the substitutions, insertions, or deletions occur in regions outside the CDRs (e.g., in the FRs). Optionally, the antibody or antigen-binding fragment thereof comprises the VL sequence SEQ ID NO: 326, including one or more post-translational modifications of that sequence. In a particular embodiment, the VL comprises one, two or three CDRs selected from: a. CDR-L1, comprising the amino acid sequence SEQ ID NO: 868, b. CDR-L2, comprising the amino acid sequence SEQ ID NO: 1410, and c. CDR-L3, comprising the amino acid sequence SEQ ID NO: 1952.

[1264] In one aspect, an antibody or antigen-binding fragment thereof is provided, wherein the antibody or antigen-binding fragment thereof comprises a VH as in any of the embodiments provided above, and a VL as in any of the embodiments provided above. In some embodiments, the antibody or antigen-binding fragment thereof comprises the VH amino acid sequence of SEQ ID NO: 55, and the VL amino acid sequence of SEQ ID NO: 326, optionally including post-translational modifications of those sequences.

### TBRE1043

[1265] In one aspect, the present disclosure provides an antibody or antigen-binding fragment thereof comprising at least one or both variable regions selected from: a. VH comprising the amino acid sequence of SEQ ID NO: 56 and b. VL comprising the amino acid sequence of SEQ ID NO: 327.

[1266] In one aspect, the present disclosure provides an antibody or antigen-binding fragment thereof comprising at least one, two, three, four, five, or six CDRs selected from: a. CDR-H1 comprising the amino acid sequence of SEQ ID NO: 598, b. CDR-H2 comprising the amino acid sequence of SEQ ID NO: 1140, c. CDR-H3 comprising the amino acid sequence of SEQ ID NO: 1682, d. CDR-L1 comprising the amino acid sequence of SEQ ID NO: 869, e. CDR-L2 comprising the amino acid sequence of SEQ ID NO: 1411, and f. CDR-L3 comprising the amino acid sequence of SEQ ID NO: 1953.

[1267] In one aspect, the present disclosure provides an antibody or antigen-binding fragment thereof comprising: a. CDR-H1 comprising the amino acid sequence of SEQ ID NO: 598, b. CDR-H2 comprising the amino acid sequence of SEQ ID NO: 1140, c. CDR-H3 comprising the amino acid sequence of SEQ ID NO: 1682, d. CDR-L1 comprising the amino acid sequence of SEQ ID NO: 869, e. CDR-L2 comprising the amino acid sequence of SEQ ID NO: 1411, and f. CDR-L3 comprising the amino acid sequence of SEQ ID NO: 1953. In one aspect, the present disclosure provides an antibody or antigen-binding fragment thereof comprising a CDR-H3 comprising the amino acid sequence of SEQ ID NO: 1682 and a CDR-L3 comprising the amino acid sequence of SEQ ID NO: 1953.

[1268] In one aspect, the present disclosure provides an antibody or antigen-binding fragment thereof comprising at least one, at least two, or all three VH CDR sequences selected from: a. CDR-H1 comprising the amino acid sequence of SEQ ID NO: 598, b. CDR-H2 comprising the amino acid sequence of SEQ ID NO: 1140, c. CDR-H3 comprising the amino acid sequence of SEQ ID NO: 1682, and a VL comprising the amino acid sequence of SEQ ID NO: 327.

[1269] In one aspect, the present disclosure provides an antibody or antigen-binding fragment thereof comprising at least one, at least two, or all three VL CDR sequences selected from: a. CDR-L1 comprising the amino acid sequence of SEQ ID NO: 869, b. CDR-L2 comprising the amino acid sequence of SEQ ID NO: 1411, c. CDR-L3 comprising the amino acid sequence of SEQ ID NO: 1953, and a VH comprising the amino acid sequence of SEQ ID NO: 56.

[1270] In one aspect, an antibody or antigen-binding fragment thereof is provided, wherein the antibody or antigen-binding fragment thereof comprises a heavy chain variable domain (VH) having at least 90%, 91%, 92%, 93%, 94%, 95%, 96%, 97%, 98%, 99%, or 100% sequence identity to the amino acid sequence SEQ ID NO: 56. In some embodiments, a VH sequence having at least 90%, 91%, 92%, 93%, 94%, 95%, 96%, 97%, 98%, or 99% identity contains substitutions (e.g., conservative substitutions), insertions, or deletions relative to the reference sequence, but an antibody or antigen-binding fragment thereof comprising that sequence retains the ability to bind to same antigen as of the parent (e.g., cancer associated antigen). In some embodiments, a total of 1 to 10 amino acids have been substituted, inserted and/or deleted in the amino acid sequence SEQ ID NO: 56. In some embodiments, substitutions, insertions, or deletions occur in regions outside the CDRs (e.g., in the FRs). Optionally, the antibody or antigen-binding fragment thereof comprises the VH sequence SEQ ID NO: 56, including one or more post-translational modifications of that sequence. In a particular embodiment, the VH comprises one, two or three CDRs selected from: a. CDR-H1, comprising the amino acid sequence SEQ ID NO: 598, b. CDR-H2, comprising the amino acid sequence SEQ ID NO: 1140, and c. CDR-H3, comprising the amino acid sequence SEQ ID NO: 1682.

[1271] In one aspect, an antibody or antigen-binding fragment thereof is provided, wherein the antibody or antigen-binding fragment thereof comprises a light chain variable domain (VL) having at least 90%, 91%, 92%, 93%, 94%, 95%, 96%, 97%, 98%, 99%, or 100% sequence identity to the amino acid sequence SEQ ID NO: 327. In some embodiments, a VL sequence having at least 90%, 91%, 92%, 93%, 94%, 95%, 96%, 97%, 98%, or 99% identity contains substitutions (e.g., conservative substitutions), insertions, or deletions relative to the reference sequence, but an antibody or antigen-binding fragment thereof comprising that sequence retains the ability to bind to same antigen as the parent (e.g., cancer associated antigen). In some embodiments, a total of 1 to 10 amino acids have been substituted, inserted and/or deleted in the amino acid sequence SEQ ID NO: 327. In some embodiments, the substitutions, insertions, or deletions occur in regions outside the CDRs (e.g., in the FRs). Optionally, the antibody or antigen-binding fragment thereof comprises the VL sequence SEQ ID NO: 327, including one or more post-translational modifications of that sequence. In a particular embodiment, the VL comprises one, two or three CDRs selected from: a. CDR-L1, comprising the amino acid sequence SEQ ID NO: 869, b. CDR-L2, comprising the amino acid sequence SEQ ID NO: 1411, and c. CDR-L3, comprising the amino acid sequence SEQ ID NO: 1953.

[1272] In one aspect, an antibody or antigen-binding fragment thereof is provided, wherein the antibody or antigen-binding fragment thereof comprises a VH as in any of the embodiments provided above, and a VL as in any of the embodiments provided above. In some embodiments, the antibody or antigen-binding fragment thereof comprises the VH amino acid sequence of SEQ ID NO: 56, and the VL amino acid sequence of SEQ ID NO: 327, optionally including post-translational modifications of those sequences.

### TBRE1044

[1273] In one aspect, the present disclosure provides an antibody or antigen-binding fragment thereof comprising at least one or both variable regions selected from: a. VH comprising the amino acid sequence of SEQ ID NO: 57 and b. VL comprising the amino acid sequence of SEQ ID NO: 328.

[1274] In one aspect, the present disclosure provides an antibody or antigen-binding fragment thereof comprising at least one, two, three, four, five, or six CDRs selected from: a. CDR-H1 comprising the amino acid sequence of SEQ ID NO: 599, b. CDR-H2 comprising the amino acid sequence of SEQ ID NO: 1141, c. CDR-H3 comprising the amino acid sequence of SEQ ID NO: 1683, c. CDR-L1 comprising the amino acid sequence of SEQ ID NO: 870, e. CDR-L2 comprising the amino acid sequence of SEQ ID NO: 1412, and f. CDR-L3 comprising the amino acid sequence of SEQ ID NO: 1954. In one aspect, the present disclosure provides an antibody or antigen-binding fragment thereof comprising: a. CDR-H1 comprising the amino acid sequence of SEQ ID NO: 599, b. CDR-H2 comprising the amino acid sequence of SEQ ID NO: 1141, c. CDR-H3 comprising the amino acid sequence of SEQ ID NO: 1683, c. CDR-L1 comprising the amino acid sequence of SEQ ID NO: 870, e. CDR-L2 comprising the amino acid sequence of SEQ ID NO: 1412, and f. CDR-L3 comprising the amino acid sequence of SEQ ID NO: 1954. In one aspect, the present disclosure provides an antibody or antigen-binding fragment thereof comprising a CDR-H3 comprising the amino acid sequence of SEQ ID NO: 1683, and a CDR-L3 comprising the amino acid sequence of SEQ ID NO: 1954.

[1275] In one aspect, the present disclosure provides an antibody or antigen-binding fragment thereof comprising at least one, at least two, or all three VH CDR sequences selected from: a. CDR-H1 comprising the amino acid sequence of SEQ ID NO: 599, b. CDR-H2 comprising the amino acid sequence of SEQ ID NO: 1141, c. CDR-H3 comprising the amino acid sequence of SEQ ID NO: 1683, and a VL comprising the amino acid sequence of SEQ ID NO: 328.

[1276] In one aspect, the present disclosure provides an antibody or antigen-binding fragment thereof comprising at least one, at least two, or all three VL CDR sequences selected from: a. CDR-L1 comprising the amino acid sequence of SEQ ID NO: 870, b. CDR-L2 comprising the amino acid sequence of SEQ ID NO: 1412, c. CDR-L3 comprising the amino acid sequence of SEQ ID NO: 1954, and a VH comprising the amino acid sequence of SEQ ID NO: 57.

[1277] In one aspect, an antibody or antigen-binding fragment thereof is provided, wherein the antibody or antigen-binding fragment thereof comprises a heavy chain variable domain (VH) having at least 90%, 91%, 92%, 93%, 94%, 95%, 96%, 97%, 98%, 99%, or 100% sequence identity to the amino acid sequence SEQ ID NO: 57. In some embodiments, a VH sequence having at least 90%, 91%, 92%, 93%, 94%, 95%, 96%, 97%, 98%, or 99% identity contains substitutions (e.g., conservative substitutions), thereof comprising that sequence retains the ability to bind to same antigen as of the parent (e.g., cancer associated antigen). In some embodiments, a total of 1 to 10 amino acids have been substituted, inserted and/or deleted in the amino acid sequence SEQ ID NO: 57. In some embodiments, substitutions, insertions, or deletions occur in regions outside the CDRs (e.g., in the FRs). Optionally, the antibody or antigen-binding fragment thereof comprises the VH sequence SEQ ID NO: 57, including one or more post-translational modifications of that sequence. In a particular embodiment, the VH comprises one, two or three CDRs selected from: a. CDR-H1, comprising the amino acid sequence SEQ ID NO: 599, b. CDR-H2, comprising the amino acid sequence SEQ ID NO: 1141, and c. CDR-H3, comprising the amino acid sequence SEQ ID NO: 1683.

[1278] In one aspect, an antibody or antigen-binding fragment thereof is provided, wherein the antibody or antigen-binding fragment thereof comprises a light chain variable domain (VL) having at least 90%, 91%, 92%, 93%, 94%, 95%, 96%, 97%, 98%, 99%, or 100% sequence identity to the amino acid sequence SEQ ID NO: 328. In some embodiments, a VL sequence having at least 90%, 91%, 92%, 93%, 94%, 95%, 96%, 97%, 98%, or 99% identity contains substitutions (e.g., conservative substitutions), insertions, or deletions relative to the reference sequence, but an antibody or antigen-binding fragment thereof comprising that sequence retains the ability to bind to same antigen as the parent (e.g., cancer associated antigen). In some embodiments, a total of 1 to 10 amino acids have been substituted, inserted and/or deleted in the amino acid sequence SEQ ID NO: 328. In some embodiments, the substitutions, insertions, or deletions occur in regions outside the CDRs (e.g., in the FRs). Optionally, the antibody or antigen-binding fragment thereof comprises the VL sequence SEQ ID NO: 328, including one or more post-translational modifications of that sequence. In a particular embodiment, the VL comprises one, two or three CDRs selected from: a. CDR-L1, comprising the amino acid sequence SEQ ID NO: 870, b. CDR-L2, comprising the amino acid sequence SEQ ID NO: 1412, and c. CDR-L3, comprising the amino acid sequence SEQ ID NO: 1954.

[1279] In one aspect, an antibody or antigen-binding fragment thereof is provided, wherein the antibody or antigen-binding fragment thereof comprises a VH as in any of the embodiments provided above, and a VL as in any of the embodiments provided above. In some embodiments, the antibody or antigen-binding fragment thereof comprises the VH amino acid sequence of SEQ ID NO: 57, and the VL amino acid sequence of SEQ ID NO: 328, optionally including post-translational modifications of those sequences.

### TBRE1045

[1280] In one aspect, the present disclosure provides an antibody or antigen-binding fragment thereof comprising at least one or both variable regions selected from: a. VH comprising the amino acid sequence of SEQ ID NO: 58 and b. VL comprising the amino acid sequence of SEQ ID NO: 329.

[1281] In one aspect, the present disclosure provides an antibody or antigen-binding fragment thereof comprising at least one, two, three, four, five, or six CDRs selected from: a. CDR-H1 comprising the amino acid sequence of SEQ ID NO: 600, b. CDR-H2 comprising the amino acid sequence of SEQ ID NO: 1142, c. CDR-H3 comprising the amino acid sequence of SEQ ID NO: 1684, d. CDR-L1 comprising the amino acid sequence of SEQ ID NO: 871, e. CDR-L2 comprising the amino acid sequence of SEQ ID NO: 1413, and f. CDR-L3 comprising the amino acid sequence of SEQ ID NO: 1955.

[1282] In one aspect, the present disclosure provides an antibody or antigen-binding fragment thereof comprising: a. CDR-H1 comprising the amino acid sequence of SEQ ID NO: 600, b. CDR-H2 comprising the amino acid sequence of SEQ ID NO: 1142, c. CDR-H3 comprising the amino acid sequence of SEQ ID NO: 1684, d. CDR-L1 comprising the amino acid sequence of SEQ ID NO: 871, e. CDR-L2 comprising the amino acid sequence of SEQ ID NO: 1413, and f. CDR-L3 comprising the amino acid sequence of SEQ ID NO: 1955. In one aspect, the present disclosure provides an antibody or antigen-binding fragment thereof comprising a CDR-H3 comprising the amino acid sequence of SEQ ID NO: 1684, and a CDR-L3 comprising the amino acid sequence of SEQ ID NO: 1955.

[1283] In one aspect, the present disclosure provides an antibody or antigen-binding fragment thereof comprising at least one, at least two, or all three VH CDR sequences selected from: a. CDR-H1 comprising the amino acid sequence of SEQ ID NO: 600, b. CDR-H2 comprising the amino acid sequence of SEQ ID NO: 1142, c. CDR-H3 comprising the amino acid sequence of SEQ ID NO: 1684, and a VL comprising the amino acid sequence of SEQ ID NO: 329.

[1284] In one aspect, the present disclosure provides an antibody or antigen-binding fragment thereof comprising at least one, at least two, or all three VL CDR sequences selected from: a. CDR-L1 comprising the amino acid sequence of SEQ ID NO: 871, b. CDR-L2 comprising the amino acid sequence of SEQ ID NO: 1413, c. CDR-L3 comprising the amino acid sequence of SEQ ID NO: 1955, and a VH comprising the amino acid sequence of SEQ ID NO: 58.

[1285] In one aspect, an antibody or antigen-binding fragment thereof is provided, wherein the antibody or antigen-binding fragment thereof comprises a heavy chain variable domain (VH) having at least 90%, 91%, 92%, 93%, 94%, 95%, 96%, 97%, 98%, 99%, or 100% sequence identity to the amino acid sequence SEQ ID NO: 58. In some embodiments, a VH sequence having at least 90%, 91%, 92%, 93%, 94%, 95%, 96%, 97%, 98%, or 99% identity contains substitutions (e.g., conservative substitutions), insertions, or deletions relative to the reference sequence, but an antibody or antigen-binding fragment thereof comprising that sequence retains the ability to bind to same antigen as of the parent (e.g., cancer associated antigen). In some embodiments, a total of 1 to 10 amino acids have been substituted, inserted and/or deleted in the amino acid sequence SEQ ID NO: 58. In some embodiments, substitutions, insertions, or deletions occur in regions outside the CDRs (e.g., in the FRs). Optionally, the antibody or antigen-binding fragment thereof comprises the VH sequence SEQ ID NO: 58, including one or more post-translational modifications of that sequence. In a particular embodiment, the VH comprises one, two or three CDRs selected from: a. CDR-H1, comprising the amino acid sequence SEQ ID NO: 600, b. CDR-H2, comprising the amino acid sequence SEQ ID NO: 1142, and c. CDR-H3, comprising the amino acid sequence SEQ ID NO: 1684.

[1286] In one aspect, an antibody or antigen-binding fragment thereof is provided, wherein the antibody or antigen-binding fragment thereof comprises a light chain variable domain (VL) having at least 90%, 91%, 92%, 93%, 94%, 95%, 96%, 97%, 98%, 99%, or 100% sequence identity to the amino acid sequence SEQ ID NO: 329. In some embodiments, a VL sequence having at least 90%, 91%, 92%, 93%, 94%, 95%, 96%, 97%, 98%, or 99% identity contains substitutions (e.g., conservative substitutions), insertions, or deletions relative to the reference sequence, but an antibody or antigen-binding fragment thereof comprising that sequence retains the ability to bind to same antigen as the parent (e.g., cancer associated antigen). In some embodiments, a total of 1 to 10 amino acids have been substituted, inserted and/or deleted in the amino acid sequence SEQ ID NO: 329. In some embodiments, the substitutions, insertions, or deletions occur in regions outside the CDRs (e.g., in the FRs). Optionally, the antibody or antigen-binding fragment thereof comprises the VL sequence SEQ ID NO: 329, including one or more post-translational modifications of that sequence. In a particular embodiment, the VL comprises one, two or three CDRs selected from: a. CDR-L1, comprising the amino acid sequence SEQ ID NO: 871, b. CDR-L2, comprising the amino acid sequence SEQ ID NO: 1413, and c. CDR-L3, comprising the amino acid sequence SEQ ID NO: 1955.

[1287] In one aspect, an antibody or antigen-binding fragment thereof is provided, wherein the antibody or antigen-binding fragment thereof comprises a VH as in any of the embodiments provided above, and a VL as in any of the embodiments provided above. In some embodiments, the antibody or antigen-binding fragment thereof comprises the VH amino acid sequence of SEQ ID NO: 58, and the VL amino acid sequence of SEQ ID NO: 329, optionally including post-translational modifications of those sequences.

### TBRE1046

[1288] In one aspect, the present disclosure provides an antibody or antigen-binding fragment thereof comprising at least one or both variable regions selected from: a. VH comprising the amino acid sequence of SEQ ID NO: 59 and b. VL comprising the amino acid sequence of SEQ ID NO: 330.

[1289] In one aspect, the present disclosure provides an antibody or antigen-binding fragment thereof comprising at least one, two, three, four, five, or six CDRs selected from: a. CDR-H1 comprising the amino acid sequence of SEQ ID NO: 601, b. CDR-H2 comprising the amino acid sequence of SEQ ID NO: 1143, c. CDR-H3 comprising the amino acid sequence of SEQ ID NO: 1685, d. CDR-L1 comprising the amino acid sequence of SEQ ID NO: 872, e. CDR-L2 comprising the amino acid sequence of SEQ ID NO: 1414, and f. CDR-L3 comprising the amino acid sequence of SEQ ID NO: 1956.

[1290] In one aspect, the present disclosure provides an antibody or antigen-binding fragment thereof comprising at least one, at least two, or all three VH CDR sequences selected from: a. CDR-H1 comprising the amino acid sequence of SEQ ID NO: 601, b. CDR-H2 comprising the amino acid sequence of SEQ ID NO: 1143, c. CDR-H3 comprising the amino acid sequence of SEQ ID NO: 1685, and a VL comprising the amino acid sequence of SEQ ID NO: 330.

[1291] In one aspect, the present disclosure provides an antibody or antigen-binding fragment thereof comprising at least one, at least two, or all three VL CDR sequences selected from: a. CDR-L1 comprising the amino acid sequence of SEQ ID NO: 872, b. CDR-L2 comprising the amino acid sequence of SEQ ID NO: 1414, c. CDR-L3 comprising the amino acid sequence of SEQ ID NO: 1956, and a VH comprising the amino acid sequence of SEQ ID NO: 59.

[1292] In one aspect, an antibody or antigen-binding fragment thereof is provided, wherein the antibody or antigen-binding fragment thereof comprises a heavy chain variable domain (VH) having at least 90%, 91%, 92%, 93%, 94%, 95%, 96%, 97%, 98%, 99%, or 100% sequence identity to the amino acid sequence SEQ ID NO: 59. In some embodiments, a VH sequence having at least 90%, 91%, 92%, 93%, 94%, 95%, 96%, 97%, 98%, or 99% identity contains substitutions (e.g., conservative substitutions), insertions, or deletions relative to the reference sequence, but an antibody or antigen-binding fragment thereof comprising that sequence retains the ability to bind to same antigen as of the parent (e.g., cancer associated antigen). In some embodiments, a total of 1 to 10 amino acids have been substituted, inserted and/or deleted in the amino acid sequence SEQ ID NO: 59. In some embodiments, substitutions, insertions, or deletions occur in regions outside the CDRs (e.g., in the FRs). Optionally, the antibody or antigen-binding fragment thereof comprises the VH sequence SEQ ID NO: 59, including one or more post-translational modifications of that sequence. In a particular embodiment, the VH comprises one, two or three CDRs selected from: a. CDR-H1, comprising the amino acid sequence SEQ ID NO: 601, b. CDR-H2, comprising the amino acid sequence SEQ ID NO: 1143, and c. CDR-H3, comprising the amino acid sequence SEQ ID NO: 1685.

[1293] In one aspect, an antibody or antigen-binding fragment thereof is provided, wherein the antibody or antigen-binding fragment thereof comprises a light chain variable domain (VL) having at least 90%, 91%, 92%, 93%, 94%, 95%, 96%, 97%, 98%, 99%, or 100% sequence identity to the amino acid sequence SEQ ID NO: 330. In some embodiments, a VL sequence having at least 90%, 91%, 92%, 93%, 94%, 95%, 96%, 97%, 98%, or 99% identity contains substitutions (e.g., conservative substitutions), insertions, or deletions relative to the reference sequence, but an antibody or antigen-binding fragment thereof comprising that sequence retains the ability to bind to same antigen as the parent (e.g., cancer associated antigen). In some embodiments, a total of 1 to 10 amino acids have been substituted, inserted and/or deleted in the amino acid sequence SEQ ID NO: 330. In some embodiments, the substitutions, insertions, or deletions occur in regions outside the CDRs (e.g., in the FRs). Optionally, the antibody or antigen-binding fragment thereof comprises the VL sequence SEQ ID NO: 330, including one or more post-translational modifications of that sequence. In a particular embodiment, the VL comprises one, two or three CDRs selected from: a. CDR-L1, comprising the amino acid sequence SEQ ID NO: 872, b. CDR-L2, comprising the amino acid sequence SEQ ID NO: 1414, and c. CDR-L3, comprising the amino acid sequence SEQ ID NO: 1956.

[1294] In one aspect, an antibody or antigen-binding fragment thereof is provided, wherein the antibody or antigen-binding fragment thereof comprises a VH as in any of the embodiments provided above, and a VL as in any of the embodiments provided above. In some embodiments, the antibody or antigen-binding fragment thereof comprises the VH amino acid sequence of SEQ ID NO: 59, and the VL amino acid sequence of SEQ ID NO: 330, optionally including post-translational modifications of those sequences.

### TBRE1047

[1295] In one aspect, the present disclosure provides an antibody or antigen-binding fragment thereof comprising at least one or both variable regions selected from: a. VH comprising the amino acid sequence of SEQ ID NO: 60 and b. VL comprising the amino acid sequence of SEQ ID NO: 331.

[1296] In one aspect, the present disclosure provides an antibody or antigen-binding fragment thereof comprising at least one, two, three, four, five, or six CDRs selected from: a. CDR-H1 comprising the amino acid sequence of SEQ ID NO: 602, b. CDR-H2 comprising the amino acid sequence of SEQ ID NO: 1144, c. CDR-H3 comprising the amino acid sequence of SEQ ID NO: 1686, d. CDR-L1 comprising the amino acid sequence of SEQ ID NO: 873, e. CDR-L2 comprising the amino acid sequence of SEQ ID NO: 1415, and f. CDR-L3 comprising the amino acid sequence of SEQ ID NO: 1957.

[1297] In one aspect, the present disclosure provides an antibody or antigen-binding fragment thereof comprising a CDR-H3 comprising the amino acid sequence of SEQ ID NO: 1686, and a CDR-L3 comprising the amino acid sequence of SEQ ID NO: 1957.

[1298] In one aspect, the present disclosure provides an antibody or antigen-binding fragment thereof comprising a CDR-H3 comprising the amino acid sequence of SEQ ID NO: 1686, and a CDR-L3 comprising the amino acid sequence of SEQ ID NO: 1957.

[1299] In one aspect, the present disclosure provides an antibody or antigen-binding fragment thereof comprising at least one, at least two, or all three VH CDR sequences selected from: a. CDR-H1 comprising the amino acid sequence of SEQ ID NO: 602, b. CDR-H2 comprising the amino acid sequence of SEQ ID NO: 1144, c. CDR-H3 comprising the amino acid sequence of SEQ ID NO: 1686, and a VL comprising the amino acid sequence of SEQ ID NO: 331.

[1300] In one aspect, the present disclosure provides an antibody or antigen-binding fragment thereof comprising at least one, at least two, or all three VL CDR sequences selected from: a. CDR-L1 comprising the amino acid sequence of SEQ ID NO: 873, b. CDR-L2 comprising the amino acid sequence of SEQ ID NO: 1415, c. CDR-L3 comprising the amino acid sequence of SEQ ID NO: 1957, and a VH comprising the amino acid sequence of SEQ ID NO: 60.

[1301] In one aspect, an antibody or antigen-binding fragment thereof is provided, wherein the antibody or antigen-binding fragment thereof comprises a heavy chain variable domain (VH) having at least 90%, 91%, 92%, 93%, 94%, 95%, 96%, 97%, 98%, 99%, or 100% sequence identity to the amino acid sequence SEQ ID NO: 60. In some embodiments, a VH sequence having at least 90%, 91%, 92%, 93%, 94%, 95%, 96%, 97%, 98%, or 99% identity contains substitutions (e.g., conservative substitutions), insertions, or deletions relative to the reference sequence, but an antibody or antigen-binding fragment thereof comprising that sequence retains the ability to bind to same antigen as of the parent (e.g., cancer associated antigen). In some embodiments, a total of 1 to 10 amino acids have been substituted, inserted and/or deleted in the amino acid sequence SEQ ID NO: 60. In some embodiments, substitutions, insertions, or deletions occur in regions outside the CDRs (e.g., in the FRs). Optionally, the antibody or antigen-binding fragment thereof comprises the VH sequence SEQ ID NO: 60, including one or more post-translational modifications of that sequence. In a particular embodiment, the VH comprises one, two or three CDRs selected from: a. CDR-H1, comprising the amino acid sequence SEQ ID NO: 602, b. CDR-H2, comprising the amino acid sequence SEQ ID NO: 1144, and c. CDR-H3, comprising the amino acid sequence SEQ ID NO: 1686.

[1302] In one aspect, an antibody or antigen-binding fragment thereof is provided, wherein the antibody or antigen-binding fragment thereof comprises a light chain variable domain (VL) having at least 90%, 91%, 92%, 93%, 94%, 95%, 96%, 97%, 98%, 99%, or 100% sequence identity to the amino acid sequence SEQ ID NO: 331. In some embodiments, a VL sequence having at least 90%, 91%, 92%, 93%, 94%, 95%, 96%, 97%, 98%, or 99% identity contains substitutions (e.g., conservative substitutions), insertions, or deletions relative to the reference sequence, but an antibody or antigen-binding fragment thereof comprising that sequence retains the ability to bind to same antigen as the parent (e.g., cancer associated antigen). In some embodiments, a total of 1 to 10 amino acids have been substituted, inserted and/or deleted in the amino acid sequence SEQ ID NO: 331. In some embodiments, the substitutions, insertions, or deletions occur in regions outside the CDRs (e.g., in the FRs). Optionally, the antibody or antigen-binding fragment thereof comprises the VL sequence SEQ ID NO: 331, including one or more post-translational modifications of that sequence. In a particular embodiment, the VL comprises one, two or three CDRs selected from: a. CDR-L1, comprising the amino acid sequence SEQ ID NO: 873, b. CDR-L2, comprising the amino acid sequence SEQ ID NO: 1415, and c. CDR-L3, comprising the amino acid sequence SEQ ID NO: 1957.

[1303] In one aspect, an antibody or antigen-binding fragment thereof is provided, wherein the antibody or antigen-binding fragment thereof comprises a VH as in any of the embodiments provided above, and a VL as in any of the embodiments provided above. In some embodiments, the antibody or antigen-binding fragment thereof comprises the VH amino acid sequence of SEQ ID NO: 60, and the VL amino acid sequence of SEQ ID NO: 331, optionally including post-translational modifications of those sequences.

### TBRE1048

[1304] In one aspect, the present disclosure provides an antibody or antigen-binding fragment thereof comprising at least one or both variable regions selected from: a. VH comprising the amino acid sequence of SEQ ID NO: 61 and b. VL comprising the amino acid sequence of SEQ ID NO: 332.

[1305] In one aspect, the present disclosure provides an antibody or antigen-binding fragment thereof comprising at least one, two, three, four, five, or six CDRs selected from: a. CDR-H1 comprising the amino acid sequence of SEQ ID NO: 603, b. CDR-H2 comprising the amino acid sequence of SEQ ID NO: 1145, c. CDR-H3 comprising the amino acid sequence of SEQ ID NO: 1687, d. CDR-L1 comprising the amino acid sequence of SEQ ID NO: 874, e. CDR-L2 comprising the amino acid sequence of SEQ ID NO: 1416, and f. CDR-L3 comprising the amino acid sequence of SEQ ID NO: 1958.

[1306] In one aspect, the present disclosure provides an antibody or antigen-binding fragment thereof comprising a CDR-H3 comprising the amino acid sequence of SEQ ID NO: 1687, and a CDR-L3 comprising the amino acid sequence of SEQ ID NO: 1958.

[1307] In one aspect, the present disclosure provides an antibody or antigen-binding fragment thereof comprising at least one, at least two, or all three VH CDR sequences selected from: a. CDR-H1 comprising the amino acid sequence of SEQ ID NO: 603, b. CDR-H2 comprising the amino acid sequence of SEQ ID NO: 1145, c. CDR-H3 comprising the amino acid sequence of SEQ ID NO: 1687, and a VL comprising the amino acid sequence of SEQ ID NO: 332.

[1308] In one aspect, the present disclosure provides an antibody or antigen-binding fragment thereof comprising at least one, at least two, or all three VL CDR sequences selected from: a. CDR-L1 comprising the amino acid sequence of SEQ ID NO: 874, b. CDR-L2 comprising the amino acid sequence of SEQ ID NO: 1416, c. CDR-L3 comprising the amino acid sequence of SEQ ID NO: 1958, and a VH comprising the amino acid sequence of SEQ ID NO: 61.

[1309] In one aspect, an antibody or antigen-binding fragment thereof is provided, wherein the antibody or antigen-binding fragment thereof comprises a heavy chain variable domain (VH) having at least 90%, 91%, 92%, 93%, 94%, 95%, 96%, 97%, 98%, 99%, or 100% sequence identity to the amino acid sequence SEQ ID NO: 61. In some embodiments, a VH sequence having at least 90%, 91%, 92%, 93%, 94%, 95%, 96%, 97%, 98%, or 99% identity contains substitutions (e.g., conservative substitutions), insertions, or deletions relative to the reference sequence, but an antibody or antigen-binding fragment thereof comprising that sequence retains the ability to bind to same antigen as of the parent (e.g., cancer associated antigen). In some embodiments, a total of 1 to 10 amino acids have been substituted, inserted and/or deleted in the amino acid sequence SEQ ID NO: 61. In some embodiments, substitutions, insertions, or deletions occur in regions outside the CDRs (e.g., in the FRs). Optionally, the antibody or antigen-binding fragment thereof comprises the VH sequence SEQ ID NO: 61, including one or more post-translational modifications of that sequence. In a particular embodiment, the VH comprises one, two or three CDRs selected from: a. CDR-H1, comprising the amino acid sequence SEQ ID NO: 603, b. CDR-H2, comprising the amino acid sequence SEQ ID NO: 1145, and c. CDR-H3, comprising the amino acid sequence SEQ ID NO: 1687.

[1310] In one aspect, an antibody or antigen-binding fragment thereof is provided, wherein the antibody or antigen-binding fragment thereof comprises a light chain variable domain (VL) having at least 90%, 91%, 92%, 93%, 94%, 95%, 96%, 97%, 98%, 99%, or 100% sequence identity to the amino acid sequence SEQ ID NO: 332. In some embodiments, a VL sequence having at least 90%, 91%, 92%, 93%, 94%, 95%, 96%, 97%, 98%, or 99% identity contains substitutions (e.g., conservative substitutions), insertions, or deletions relative to the reference sequence, but an antibody or antigen-binding fragment thereof comprising that sequence retains the ability to bind to same antigen as the parent (e.g., cancer associated antigen). In some embodiments, a total of 1 to 10 amino acids have been substituted, inserted and/or deleted in the amino acid sequence SEQ ID NO: 332. In some embodiments, the substitutions, insertions, or deletions occur in regions outside the CDRs (e.g., in the FRs). Optionally, the antibody or antigen-binding fragment thereof comprises the VL sequence SEQ ID NO: 332, including one or more post-translational modifications of that sequence. In a particular embodiment, the VL comprises one, two or three CDRs selected from: a. CDR-L1, comprising the amino acid sequence SEQ ID NO: 874, b. CDR-L2, comprising the amino acid sequence SEQ ID NO: 1416, and c. CDR-L3, comprising the amino acid sequence SEQ ID NO: 1958.

[1311] In one aspect, an antibody or antigen-binding fragment thereof is provided, wherein the antibody or antigen-binding fragment thereof comprises a VH as in any of the embodiments provided above, and a VL as in any of the embodiments provided above. In some embodiments, the antibody or antigen-binding fragment thereof comprises the VH amino acid sequence of SEQ ID NO: 61, and the VL amino acid sequence of SEQ ID NO: 332, optionally including post-translational modifications of those sequences.

### TBRE1049

[1312] In one aspect, the present disclosure provides an antibody or antigen-binding fragment thereof comprising at least one or both variable regions selected from: a. VH comprising the amino acid sequence of SEQ ID NO: 62 and b. VL comprising the amino acid sequence of SEQ ID NO: 333.

[1313] In one aspect, the present disclosure provides an antibody or antigen-binding fragment thereof comprising at least one, two, three, four, five, or six CDRs selected from: a. CDR-H1 comprising the amino acid sequence of SEQ ID NO: 604, b. CDR-H2 comprising the amino acid sequence of SEQ ID NO: 1146, c. CDR-H3 comprising the amino acid sequence of SEQ ID NO: 1688, d. CDR-L1 comprising the amino acid sequence of SEQ ID NO: 875, e. CDR-L2 comprising the amino acid sequence of SEQ ID NO: 1417, and f. CDR-L3 comprising the amino acid sequence of SEQ ID NO: 1959.

[1314] In one aspect, the present disclosure provides an antibody or antigen-binding fragment thereof comprising: a. CDR-H1 comprising the amino acid sequence of SEQ ID NO: 604, b. CDR-H2 comprising the amino acid sequence of SEQ ID NO: 1146, c. CDR-H3 comprising the amino acid sequence of SEQ ID NO: 1688, d. CDR-L1 comprising the amino acid sequence of SEQ ID NO: 875, e. CDR-L2 comprising the amino acid sequence of SEQ ID NO: 1417, and f. CDR-L3 comprising the amino acid sequence of SEQ ID NO: 1959.

[1315] In one aspect, the present disclosure provides an antibody or antigen-binding fragment thereof comprising a CDR-H3 comprising the amino acid sequence of SEQ ID NO: 1688, and a CDR-L3 comprising the amino acid sequence of SEQ ID NO: 1959.

[1316] In one aspect, the present disclosure provides an antibody or antigen-binding fragment thereof comprising at least one, at least two, or all three VH CDR sequences selected from: a. CDR-H1 comprising the amino acid sequence of SEQ ID NO: 604, b. CDR-H2 comprising the amino acid sequence of SEQ ID NO: 1146, c. CDR-H3 comprising the amino acid sequence of SEQ ID NO: 1688, and a VL comprising the amino acid sequence of SEQ ID NO: 333.

[1317] In one aspect, the present disclosure provides an antibody or antigen-binding fragment thereof comprising at least one, at least two, or all three VL CDR sequences selected from: a. CDR-L1 comprising the amino acid sequence of SEQ ID NO: 875, b. CDR-L2 comprising the amino acid sequence of SEQ ID NO: 1417, c. CDR-L3 comprising the amino acid sequence of SEQ ID NO: 1959, and a VH comprising the amino acid sequence of SEQ ID NO: 62.

[1318] In one aspect, an antibody or antigen-binding fragment thereof is provided, wherein the antibody or antigen-binding fragment thereof comprises a heavy chain variable domain (VH) having at least 90%, 91%, 92%, 93%, 94%, 95%, 96%, 97%, 98%, 99%, or 100% sequence identity to the amino acid sequence SEQ ID NO: 62. In some embodiments, a VH sequence having at least 90%, 91%, 92%, 93%, 94%, 95%, 96%, 97%, 98%, or 99% identity contains substitutions (e.g., conservative substitutions), insertions, or deletions relative to the reference sequence, but an antibody or antigen-binding fragment thereof comprising that sequence retains the ability to bind to same antigen as of the parent (e.g., cancer associated antigen). In some embodiments, a total of 1 to 10 amino acids have been substituted, inserted and/or deleted in the amino acid sequence SEQ ID NO: 62. In some embodiments, substitutions, insertions, or deletions occur in regions outside the CDRs (e.g., in the FRs). Optionally, the antibody or antigen-binding fragment thereof comprises the VH sequence SEQ ID NO: 62, including one or more post-translational modifications of that sequence. In a particular embodiment, the VH comprises one, two or three CDRs selected from: a. CDR-H1, comprising the amino acid sequence SEQ ID NO: 604, b. CDR-H2, comprising the amino acid sequence SEQ ID NO: 1146, and c. CDR-H3, comprising the amino acid sequence SEQ ID NO: 1688.

[1319] In one aspect, an antibody or antigen-binding fragment thereof is provided, wherein the antibody or antigen-binding fragment thereof comprises a light chain variable domain (VL) having at least 90%, 91%, 92%, 93%, 94%, 95%, 96%, 97%, 98%, 99%, or 100% sequence identity to the amino acid sequence SEQ ID NO: 333. In some embodiments, a VL sequence having at least 90%, 91%, 92%, 93%, 94%, 95%, 96%, 97%, 98%, or 99% identity contains substitutions (e.g., conservative substitutions), insertions, or deletions relative to the reference sequence, but an antibody or antigen-binding fragment thereof comprising that sequence retains the ability to bind to same antigen as the parent (e.g., cancer associated antigen). In some embodiments, a total of 1 to 10 amino acids have been substituted, inserted and/or deleted in the amino acid sequence SEQ ID NO: 333. In some embodiments, the substitutions, insertions, or deletions occur in regions outside the CDRs (e.g., in the FRs). Optionally, the antibody or antigen-binding fragment thereof comprises the VL sequence SEQ ID NO: 333, including one or more post-translational modifications of that sequence. In a particular embodiment, the VL comprises one, two or three CDRs selected from: a. CDR-L1, comprising the amino acid sequence SEQ ID NO: 875, b. CDR-L2, comprising the amino acid sequence SEQ ID NO: 1417, and c. CDR-L3, comprising the amino acid sequence SEQ ID NO: 1959.

[1320] In one aspect, an antibody or antigen-binding fragment thereof is provided, wherein the antibody or antigen-binding fragment thereof comprises a VH as in any of the embodiments provided above, and a VL as in any of the embodiments provided above. In some embodiments, the antibody or antigen-binding fragment thereof comprises the VH amino acid sequence of SEQ ID NO: 62, and the VL amino acid sequence of SEQ ID NO: 333, optionally including post-translational modifications of those sequences.

### TBRE1050

[1321] In one aspect, the present disclosure provides an antibody or antigen-binding fragment thereof comprising at least one or both variable regions selected from: a. VH comprising the amino acid sequence of SEQ ID NO: 63 and b. VL comprising the amino acid sequence of SEQ ID NO: 334.

[1322] In one aspect, the present disclosure provides an antibody or antigen-binding fragment thereof comprising at least one, two, three, four, five, or six CDRs selected from: a. CDR-H1 comprising the amino acid sequence of SEQ ID NO: 605, b. CDR-H2 comprising the amino acid sequence of SEQ ID NO: 1147, c. CDR-H3 comprising the amino acid sequence of SEQ ID NO: 1689, d. CDR-L1 comprising the amino acid sequence of SEQ ID NO: 876, e. CDR-L2 comprising the amino acid sequence of SEQ ID NO: 1418, and f. CDR-L3 comprising the amino acid sequence of SEQ ID NO: 1960.

[1323] In one aspect, the present disclosure provides an antibody or antigen-binding fragment thereof comprising: a. CDR-H1 comprising the amino acid sequence of SEQ ID NO: 605, b. CDR-H2 comprising the amino acid sequence of SEQ ID NO: 1147, c. CDR-H3 comprising the amino acid sequence of SEQ ID NO: 1689, d. CDR-L1 comprising the amino acid sequence of SEQ ID NO: 876, e. CDR-L2 comprising the amino acid sequence of SEQ ID NO: 1418, and f. CDR-L3 comprising the amino acid sequence of SEQ ID NO: 1960. In one aspect, the present disclosure provides an antibody or antigen-binding fragment thereof comprising a CDR-H3 comprising the amino acid sequence of SEQ ID NO: 1689, and a CDR-L3 comprising the amino acid sequence of SEQ ID NO: 1960.

[1324] In one aspect, the present disclosure provides an antibody or antigen-binding fragment thereof comprising at least one, at least two, or all three VH CDR sequences selected from: a. CDR-H1 comprising the amino acid sequence of SEQ ID NO: 605, b. CDR-H2 comprising the amino acid sequence of SEQ ID NO: 1147, c. CDR-H3 comprising the amino acid sequence of SEQ ID NO: 1689, and a VL comprising the amino acid sequence of SEQ ID NO: 334.

[1325] In one aspect, the present disclosure provides an antibody or antigen-binding fragment thereof comprising at least one, at least two, or all three VL CDR sequences selected from: a. CDR-L1 comprising the amino acid sequence of SEQ ID NO: 876, b. CDR-L2 comprising the amino acid sequence of SEQ ID NO: 1418, c. CDR-L3 comprising the amino acid sequence of SEQ ID NO: 1960, and a VH comprising the amino acid sequence of SEQ ID NO: 63.

[1326] In one aspect, an antibody or antigen-binding fragment thereof is provided, wherein the antibody or antigen-binding fragment thereof comprises a heavy chain variable domain (VH) having at least 90%, 91%, 92%, 93%, 94%, 95%, 96%, 97%, 98%, 99%, or 100% sequence identity to the amino acid sequence SEQ ID NO: 63. In some embodiments, a VH sequence having at least 90%, 91%, 92%, 93%, 94%, 95%, 96%, 97%, 98%, or 99% identity contains substitutions (e.g., conservative substitutions), insertions, or deletions relative to the reference sequence, but an antibody or antigen-binding fragment thereof comprising that sequence retains the ability to bind to same antigen as of the parent (e.g., cancer associated antigen). In some embodiments, a total of 1 to 10 amino acids have been substituted, inserted and/or deleted in the amino acid sequence SEQ ID NO: 63. In some embodiments, substitutions, insertions, or deletions occur in regions outside the CDRs (e.g., in the FRs). Optionally, the antibody or antigen-binding fragment thereof comprises the VH sequence SEQ ID NO: 63, including one or more post-translational modifications of that sequence. In a particular embodiment, the VH comprises one, two or three CDRs selected from: a. CDR-H1, comprising the amino acid sequence SEQ ID NO: 605, b. CDR-H2, comprising the amino acid sequence SEQ ID NO: 1147, and c. CDR-H3, comprising the amino acid sequence SEQ ID NO: 1689.

[1327] In one aspect, an antibody or antigen-binding fragment thereof is provided, wherein the antibody or antigen-binding fragment thereof comprises a light chain variable domain (VL) having at least 90%, 91%, 92%, 93%, 94%, 95%, 96%, 97%, 98%, 99%, or 100% sequence identity to the amino acid sequence SEQ ID NO: 334. In some embodiments, a VL sequence having at least 90%, 91%, 92%, 93%, 94%, 95%, 96%, 97%, 98%, or 99% identity contains substitutions (e.g., conservative substitutions), insertions, or deletions relative to the reference sequence, but an antibody or antigen-binding fragment thereof comprising that sequence retains the ability to bind to same antigen as the parent (e.g., cancer associated antigen). In some embodiments, a total of 1 to 10 amino acids have been substituted, inserted and/or deleted in the amino acid sequence SEQ ID NO: 334. In some embodiments, the substitutions, insertions, or deletions occur in regions outside the CDRs (e.g., in the FRs). Optionally, the antibody or antigen-binding fragment thereof comprises the VL sequence SEQ ID NO: 334, including one or more post-translational modifications of that sequence. In a particular embodiment, the VL comprises one, two or three CDRs selected from: a. CDR-L1, comprising the amino acid sequence SEQ ID NO: 876, b. CDR-L2, comprising the amino acid sequence SEQ ID NO: 1418, and c. CDR-L3, comprising the amino acid sequence SEQ ID NO: 1960.

[1328] In one aspect, an antibody or antigen-binding fragment thereof is provided, wherein the antibody or antigen-binding fragment thereof comprises a VH as in any of the embodiments provided above, and a VL as in any of the embodiments provided above. In some embodiments, the antibody or antigen-binding fragment thereof comprises the VH amino acid sequence of SEQ ID NO: 63, and the VL amino acid sequence of SEQ ID NO: 334, optionally including post-translational modifications of those sequences.

### TBRE1051

[1329] In one aspect, the present disclosure provides an antibody or antigen-binding fragment thereof comprising at least one or both variable regions selected from: a. VH comprising the amino acid sequence of SEQ ID NO: 64 and b. VL comprising the amino acid sequence of SEQ ID NO: 335.

[1330] In one aspect, the present disclosure provides an antibody or antigen-binding fragment thereof comprising at least one, two, three, four, five, or six CDRs selected from: a. CDR-H1 comprising the amino acid sequence of SEQ ID NO: 606, b. CDR-H2 comprising the amino acid sequence of SEQ ID NO: 1148, c. CDR-H3 comprising the amino acid sequence of SEQ ID NO: 1690, d. CDR-L1 comprising the amino acid sequence of SEQ ID NO: 877, e. CDR-L2 comprising the amino acid sequence of SEQ ID NO: 1419, and f. CDR-L3 comprising the amino acid sequence of SEQ ID NO: 1961.

[1331] In one aspect, the present disclosure provides an antibody or antigen-binding fragment thereof comprising a CDR-H3 comprising the amino acid sequence of SEQ ID NO: 1690 and a CDR-L3 comprising the amino acid sequence of SEQ ID NO: 1961. In one aspect, the present disclosure provides an antibody or antigen-binding fragment thereof comprising: a. CDR-H1 comprising the amino acid sequence of SEQ ID NO: 606, b. CDR-H2 comprising the amino acid sequence of SEQ ID NO: 1148, c. CDR-H3 comprising the amino acid sequence of SEQ ID NO: 1690, d. CDR-L1 comprising the amino acid sequence of SEQ ID NO: 877, e. CDR-L2 comprising the amino acid sequence of SEQ ID NO: 1419, and f. CDR-L3 comprising the amino acid sequence of SEQ ID NO: 1961.

[1332] In one aspect, the present disclosure provides an antibody or antigen-binding fragment thereof comprising at least one, at least two, or all three VH CDR sequences selected from: a. CDR-H1 comprising the amino acid sequence of SEQ ID NO: 606, b. CDR-H2 comprising the amino acid sequence of SEQ ID NO: 1148, c. CDR-H3 comprising the amino acid sequence of SEQ ID NO: 1690, and a VL comprising the amino acid sequence of SEQ ID NO: 335.

[1333] In one aspect, the present disclosure provides an antibody or antigen-binding fragment thereof comprising at least one, at least two, or all three VL CDR sequences selected from: a. CDR-L1 comprising the amino acid sequence of SEQ ID NO: 877, b. CDR-L2 comprising the amino acid sequence of SEQ ID NO: 1419, c. CDR-L3 comprising the amino acid sequence of SEQ ID NO: 1961, and a VH comprising the amino acid sequence of SEQ ID NO: 64.

[1334] In one aspect, an antibody or antigen-binding fragment thereof is provided, wherein the antibody or antigen-binding fragment thereof comprises a heavy chain variable domain (VH) having at least 90%, 91%, 92%, 93%, 94%, 95%, 96%, 97%, 98%, 99%, or 100% sequence identity to the amino acid sequence SEQ ID NO: 64. In some embodiments, a VH sequence having at least 90%, 91%, 92%, 93%, 94%, 95%, 96%, 97%, 98%, or 99% identity contains substitutions (e.g., conservative substitutions), insertions, or deletions relative to the reference sequence, but an antibody or antigen-binding fragment thereof comprising that sequence retains the ability to bind to same antigen as of the parent (e.g., cancer associated antigen). In some embodiments, a total of 1 to 10 amino acids have been substituted, inserted and/or deleted in the amino acid sequence SEQ ID NO: 64. In some embodiments, substitutions, insertions, or deletions occur in regions outside the CDRs (e.g., in the FRs). Optionally, the antibody or antigen-binding fragment thereof comprises the VH sequence SEQ ID NO: 64, including one or more post-translational modifications of that sequence. In a particular embodiment, the VH comprises one, two or three CDRs selected from: a. CDR-H1, comprising the amino acid sequence SEQ ID NO: 606, b. CDR-H2, comprising the amino acid sequence SEQ ID NO: 1148, and c. CDR-H3, comprising the amino acid sequence SEQ ID NO: 1690.

[1335] In one aspect, an antibody or antigen-binding fragment thereof is provided, wherein the antibody or antigen-binding fragment thereof comprises a light chain variable domain (VL) having at least 90%, 91%, 92%, 93%, 94%, 95%, 96%, 97%, 98%, 99%, or 100% sequence identity to the amino acid sequence SEQ ID NO: 335. In some embodiments, a VL sequence having at least 90%, 91%, 92%, 93%, 94%, 95%, 96%, 97%, 98%, or 99% identity contains substitutions (e.g., conservative substitutions), insertions, or deletions relative to the reference sequence, but an antibody or antigen-binding fragment thereof comprising that sequence retains the ability to bind to same antigen as the parent (e.g., cancer associated antigen). In some embodiments, a total of 1 to 10 amino acids have been substituted, inserted and/or deleted in the amino acid sequence SEQ ID NO: 335. In some embodiments, the substitutions, insertions, or deletions occur in regions outside the CDRs (e.g., in the FRs). Optionally, the antibody or antigen-binding fragment thereof comprises the VL sequence SEQ ID NO: 335, including one or more post-translational modifications of that sequence. In a particular embodiment, the VL comprises one, two or three CDRs selected from: a. CDR-L1, comprising the amino acid sequence SEQ ID NO: 877, b. CDR-L2, comprising the amino acid sequence SEQ ID NO: 1419, and c. CDR-L3, comprising the amino acid sequence SEQ ID NO: 1961.

[1336] In one aspect, an antibody or antigen-binding fragment thereof is provided, wherein the antibody or antigen-binding fragment thereof comprises a VH as in any of the embodiments provided above, and a VL as in any of the embodiments provided above. In some embodiments, the antibody or antigen-binding fragment thereof comprises the VH amino acid sequence of SEQ ID NO: 64, and the VL amino acid sequence of SEQ ID NO: 335, optionally including post-translational modifications of those sequences.

### TBRE1052

[1337] In one aspect, the present disclosure provides an antibody or antigen-binding fragment thereof comprising at least one or both variable regions selected from: a. VH comprising the amino acid sequence of SEQ ID NO: 65 and b. VL comprising the amino acid sequence of SEQ ID NO: 336.

[1338] In one aspect, the present disclosure provides an antibody or antigen-binding fragment thereof comprising at least one, two, three, four, five, or six CDRs selected from: a. CDR-H1 comprising the amino acid sequence of SEQ ID NO: 607, b. CDR-H2 comprising the amino acid sequence of SEQ ID NO: 1149, c. CDR-H3 comprising the amino acid sequence of SEQ ID NO: 1691, d. CDR-L1 comprising the amino acid sequence of SEQ ID NO: 878, e. CDR-L2 comprising the amino acid sequence of SEQ ID NO: 1420, and f. CDR-L3 comprising the amino acid sequence of SEQ ID NO: 1962.

[1339] In one aspect, the present disclosure provides an antibody or antigen-binding fragment thereof comprising a CDR-H3 comprising the amino acid sequence of SEQ ID NO: 1691, and a CDR-L3 comprising the amino acid sequence of SEQ ID NO: 1962.

[1340] In one aspect, the present disclosure provides an antibody or antigen-binding fragment thereof comprising: a. CDR-H1 comprising the amino acid sequence of SEQ ID NO: 607, b. CDR-H2 comprising the amino acid sequence of SEQ ID NO: 1149, c. CDR-H3 comprising the amino acid sequence of SEQ ID NO: 1691, d. CDR-L1 comprising the amino acid sequence of SEQ ID NO: 878, e. CDR-L2 comprising the amino acid sequence of SEQ ID NO: 1420, and f. CDR-L3 comprising the amino acid sequence of SEQ ID NO: 1962.

[1341] In one aspect, the present disclosure provides an antibody or antigen-binding fragment thereof comprising at least one, at least two, or all three VH CDR sequences selected from: a. CDR-H1 comprising the amino acid sequence of SEQ ID NO: 607, b. CDR-H2 comprising the amino acid sequence of SEQ ID NO: 1149, c. CDR-H3 comprising the amino acid sequence of SEQ ID NO: 1691, and a VL comprising the amino acid sequence of SEQ ID NO: 336.

[1342] In one aspect, the present disclosure provides an antibody or antigen-binding fragment thereof comprising at least one, at least two, or all three VL CDR sequences selected from: a. CDR-L1 comprising the amino acid sequence of SEQ ID NO: 878, b. CDR-L2 comprising the amino acid sequence of SEQ ID NO: 1420, c. CDR-L3 comprising the amino acid sequence of SEQ ID NO: 1962, and a VH comprising the amino acid sequence of SEQ ID NO: 65.

[1343] In one aspect, an antibody or antigen-binding fragment thereof is provided, wherein the antibody or antigen-binding fragment thereof comprises a heavy chain variable domain (VH) having at least 90%, 91%, 92%, 93%, 94%, 95%, 96%, 97%, 98%, 99%, or 100% sequence identity to the amino acid sequence SEQ ID NO: 65. In some embodiments, a VH sequence having at least 90%, 91%, 92%, 93%, 94%, 95%, 96%, 97%, 98%, or 99% identity contains substitutions (e.g., conservative substitutions), insertions, or deletions relative to the reference sequence, but an antibody or antigen-binding fragment thereof comprising that sequence retains the ability to bind to same antigen as of the parent (e.g., cancer associated antigen). In some embodiments, a total of 1 to 10 amino acids have been substituted, inserted and/or deleted in the amino acid sequence SEQ ID NO: 65. In some embodiments, substitutions, insertions, or deletions occur in regions outside the CDRs (e.g., in the FRs). Optionally, the antibody or antigen-binding fragment thereof comprises the VH sequence SEQ ID NO: 65, including one or more post-translational modifications of that sequence. In a particular embodiment, the VH comprises one, two or three CDRs selected from: a. CDR-H1, comprising the amino acid sequence SEQ ID NO: 607, b. CDR-H2, comprising the amino acid sequence SEQ ID NO: 1149, and c. CDR-H3, comprising the amino acid sequence SEQ ID NO: 1691.

[1344] In one aspect, an antibody or antigen-binding fragment thereof is provided, wherein the antibody or antigen-binding fragment thereof comprises a light chain variable domain (VL) having at least 90%, 91%, 92%, 93%, 94%, 95%, 96%, 97%, 98%, 99%, or 100% sequence identity to the amino acid sequence SEQ ID NO: 336. In some embodiments, a VL sequence having at least 90%, 91%, 92%, 93%, 94%, 95%, 96%, 97%, 98%, or 99% identity contains substitutions (e.g., conservative substitutions), insertions, or deletions relative to the reference sequence, but an antibody or antigen-binding fragment thereof comprising that sequence retains the ability to bind to same antigen as the parent (e.g., cancer associated antigen). In some embodiments, a total of 1 to 10 amino acids have been substituted, inserted and/or deleted in the amino acid sequence SEQ ID NO: 336. In some embodiments, the substitutions, insertions, or deletions occur in regions outside the CDRs (e.g., in the FRs). Optionally, the antibody or antigen-binding fragment thereof comprises the VL sequence SEQ ID NO: 336, including one or more post-translational modifications of that sequence. In a particular embodiment, the VL comprises one, two or three CDRs selected from: a. CDR-L1, comprising the amino acid sequence SEQ ID NO: 878, b. CDR-L2, comprising the amino acid sequence SEQ ID NO: 1420, and c. CDR-L3, comprising the amino acid sequence SEQ ID NO: 1962.

[1345] In one aspect, an antibody or antigen-binding fragment thereof is provided, wherein the antibody or antigen-binding fragment thereof comprises a VH as in any of the embodiments provided above, and a VL as in any of the embodiments provided above. In some embodiments, the antibody or antigen-binding fragment thereof comprises the VH amino acid sequence of SEQ ID NO: 65, and the VL amino acid sequence of SEQ ID NO: 336, optionally including post-translational modifications of those sequences.

### TBRE1053

[1346] In one aspect, the present disclosure provides an antibody or antigen-binding fragment thereof comprising at least one or both variable regions selected from: a. VH comprising the amino acid sequence of SEQ ID NO: 66 and b. VL comprising the amino acid sequence of SEQ ID NO: 337.

[1347] In one aspect, the present disclosure provides an antibody or antigen-binding fragment thereof comprising at least one, two, three, four, five, or six CDRs selected from: a. CDR-H1 comprising the amino acid sequence of SEQ ID NO: 608, b. CDR-H2 comprising the amino acid sequence of SEQ ID NO: 1150, c. CDR-H3 comprising the amino acid sequence of SEQ ID NO: 1692, d. CDR-L1 comprising the amino acid sequence of SEQ ID NO: 879, e. CDR-L2 comprising the amino acid sequence of SEQ ID NO: 1421, and f. CDR-L3 comprising the amino acid sequence of SEQ ID NO: 1963.

[1348] In one aspect, the present disclosure provides an antibody or antigen-binding fragment thereof comprising a CDR-H3 comprising the amino acid sequence of SEQ ID NO: 1692, and a CDR-L3 comprising the amino acid sequence of SEQ ID NO: 1963.

[1349] In one aspect, the present disclosure provides an antibody or antigen-binding fragment thereof comprising: a. CDR-H1 comprising the amino acid sequence of SEQ ID NO: 608, b. CDR-H2 comprising the amino acid sequence of SEQ ID NO: 1150, c. CDR-H3 comprising the amino acid sequence of SEQ ID NO: 1692, d. CDR-L1 comprising the amino acid sequence of SEQ ID NO: 879, e. CDR-L2 comprising the amino acid sequence of SEQ ID NO: 1421, and f. CDR-L3 comprising the amino acid sequence of SEQ ID NO: 1963.

[1350] In one aspect, the present disclosure provides an antibody or antigen-binding fragment thereof comprising at least one, at least two, or all three VH CDR sequences selected from: a. CDR-H1 comprising the amino acid sequence of SEQ ID NO: 608, b. CDR-H2 comprising the amino acid sequence of SEQ ID NO: 1150, c. CDR-H3 comprising the amino acid sequence of SEQ ID NO: 1692, and a VL comprising the amino acid sequence of SEQ ID NO: 337.

[1351] In one aspect, the present disclosure provides an antibody or antigen-binding fragment thereof comprising at least one, at least two, or all three VL CDR sequences selected from: a. CDR-L1 comprising the amino acid sequence of SEQ ID NO: 879, b. CDR-L2 comprising the amino acid sequence of SEQ ID NO: 1421, c. CDR-L3 comprising the amino acid sequence of SEQ ID NO: 1963, and a VH comprising the amino acid sequence of SEQ ID NO: 66.

[1352] In one aspect, an antibody or antigen-binding fragment thereof is provided, wherein the antibody or antigen-binding fragment thereof comprises a heavy chain variable domain (VH) having at least 90%, 91%, 92%, 93%, 94%, 95%, 96%, 97%, 98%, 99%, or 100% sequence identity to the amino acid sequence SEQ ID NO: 66. In some embodiments, a VH sequence having at least 90%, 91%, 92%, 93%, 94%, 95%, 96%, 97%, 98%, or 99% identity contains substitutions (e.g., conservative substitutions), insertions, or deletions relative to the reference sequence, but an antibody or antigen-binding fragment thereof comprising that sequence retains the ability to bind to same antigen as of the parent (e.g., cancer associated antigen). In some embodiments, a total of 1 to 10 amino acids have been substituted, inserted and/or deleted in the amino acid sequence SEQ ID NO: 66. In some embodiments, substitutions, insertions, or deletions occur in regions outside the CDRs (e.g., in the FRs). Optionally, the antibody or antigen-binding fragment thereof comprises the VH sequence SEQ ID NO: 66, including one or more post-translational modifications of that sequence. In a particular embodiment, the VH comprises one, two or three CDRs selected from: a. CDR-H1, comprising the amino acid sequence SEQ ID NO: 608, b. CDR-H2, comprising the amino acid sequence SEQ ID NO: 1150, and a. CDR-H3, comprising the amino acid sequence SEQ ID NO: 1692.

[1353] In one aspect, an antibody or antigen-binding fragment thereof is provided, wherein the antibody or antigen-binding fragment thereof comprises a light chain variable domain (VL) having at least 90%, 91%, 92%, 93%, 94%, 95%, 96%, 97%, 98%, 99%, or 100% sequence identity to the amino acid sequence SEQ ID NO: 337. In some embodiments, a VL sequence having at least 90%, 91%, 92%, 93%, 94%, 95%, 96%, 97%, 98%, or 99% identity contains substitutions (e.g., conservative substitutions), insertions, or deletions relative to the reference sequence, but an antibody or antigen-binding fragment thereof comprising that sequence retains the ability to bind to same antigen as the parent (e.g., cancer associated antigen). In some embodiments, a total of 1 to 10 amino acids have been substituted, inserted and/or deleted in the amino acid sequence SEQ ID NO: 337. In some embodiments, the substitutions, insertions, or deletions occur in regions outside the CDRs (e.g., in the FRs). Optionally, the antibody or antigen-binding fragment thereof comprises the VL sequence SEQ ID NO: 337, including one or more post-translational modifications of that sequence. In a particular embodiment, the VL comprises one, two or three CDRs selected from: a. CDR-L1, comprising the amino acid sequence SEQ ID NO: 879, b. CDR-L2, comprising the amino acid sequence SEQ ID NO: 1421, and c. CDR-L3, comprising the amino acid sequence SEQ ID NO: 1963.

[1354] In one aspect, an antibody or antigen-binding fragment thereof is provided, wherein the antibody or antigen-binding fragment thereof comprises a VH as in any of the embodiments provided above, and a VL as in any of the embodiments provided above. In some embodiments, the antibody or antigen-binding fragment thereof comprises the VH amino acid sequence of SEQ ID NO: 66, and the VL amino acid sequence of SEQ ID NO: 337, optionally including post-translational modifications of those sequences.

### TBRE1054

[1355] In one aspect, the present disclosure provides an antibody or antigen-binding fragment thereof comprising at least one or both variable regions selected from: a. VH comprising the amino acid sequence of SEQ ID NO: 67 and b. VL comprising the amino acid sequence of SEQ ID NO: 338.

[1356] In one aspect, the present disclosure provides an antibody or antigen-binding fragment thereof comprising at least one, two, three, four, five, or six CDRs selected from: a. CDR-H1 comprising the amino acid sequence of SEQ ID NO: 609, b. CDR-H2 comprising the amino acid sequence of SEQ ID NO: 1151, c. CDR-H3 comprising the amino acid sequence of SEQ ID NO: 1693, d. CDR-L1 comprising the amino acid sequence of SEQ ID NO: 880, e. CDR-L2 comprising the amino acid sequence of SEQ ID NO: 1422, and f. CDR-L3 comprising the amino acid sequence of SEQ ID NO: 1964.

[1357] In one aspect, the present disclosure provides an antibody or antigen-binding fragment thereof comprising a CDR-H3 comprising the amino acid sequence of SEQ ID NO: 1693, and a CDR-L3 comprising the amino acid sequence of SEQ ID NO: 1964.

[1358] In one aspect, the present disclosure provides an antibody or antigen-binding fragment thereof comprising: a. CDR-H1 comprising the amino acid sequence of SEQ ID NO: 609, b. CDR-H2 comprising the amino acid sequence of SEQ ID NO: 1151, c. CDR-H3 comprising the amino acid sequence of SEQ ID NO: 1693, d. CDR-L1 comprising the amino acid sequence of SEQ ID NO: 880, e. CDR-L2 comprising the amino acid sequence of SEQ ID NO: 1422, and f. CDR-L3 comprising the amino acid sequence of SEQ ID NO: 1964.

[1359] In one aspect, the present disclosure provides an antibody or antigen-binding fragment thereof comprising at least one, at least two, or all three VH CDR sequences selected from: a. CDR-H1 comprising the amino acid sequence of SEQ ID NO: 609, b. CDR-H2 comprising the amino acid sequence of SEQ ID NO: 1151, c. CDR-H3 comprising the amino acid sequence of SEQ ID NO: 1693, and a VL comprising the amino acid sequence of SEQ ID NO: 338.

[1360] In one aspect, the present disclosure provides an antibody or antigen-binding fragment thereof comprising at least one, at least two, or all three VL CDR sequences selected from: a. CDR-L1 comprising the amino acid sequence of SEQ ID NO: 880, b. CDR-L2 comprising the amino acid sequence of SEQ ID NO: 1422, c. CDR-L3 comprising the amino acid sequence of SEQ ID NO: 1964, and a VH comprising the amino acid sequence of SEQ ID NO: 67.

[1361] In one aspect, an antibody or antigen-binding fragment thereof is provided, wherein the antibody or antigen-binding fragment thereof comprises a heavy chain variable domain (VH) having at least 90%, 91%, 92%, 93%, 94%, 95%, 96%, 97%, 98%, 99%, or 100% sequence identity to the amino acid sequence SEQ ID NO: 67. In some embodiments, a VH sequence having at least 90%, 91%, 92%, 93%, 94%, 95%, 96%, 97%, 98%, or 99% identity contains substitutions (e.g., conservative substitutions), insertions, or deletions relative to the reference sequence, but an antibody or antigen-binding fragment thereof comprising that sequence retains the ability to bind to same antigen as of the parent (e.g., cancer associated antigen). In some embodiments, a total of 1 to 10 amino acids have been substituted, inserted and/or deleted in the amino acid sequence SEQ ID NO: 67. In some embodiments, substitutions, insertions, or deletions occur in regions outside the CDRs (e.g., in the FRs). Optionally, the antibody or antigen-binding fragment thereof comprises the VH sequence SEQ ID NO: 67, including one or more post-translational modifications of that sequence. In a particular embodiment, the VH comprises one, two or three CDRs selected from: a. CDR-H1, comprising the amino acid sequence SEQ ID NO: 609, b. CDR-H2, comprising the amino acid sequence SEQ ID NO: 1151, and c. CDR-H3, comprising the amino acid sequence SEQ ID NO: 1693.

[1362] In one aspect, an antibody or antigen-binding fragment thereof is provided, wherein the antibody or antigen-binding fragment thereof comprises a light chain variable domain (VL) having at least 90%, 91%, 92%, 93%, 94%, 95%, 96%, 97%, 98%, 99%, or 100% sequence identity to the amino acid sequence SEQ ID NO: 338. In some embodiments, a VL sequence having at least 90%, 91%, 92%, 93%, 94%, 95%, 96%, 97%, 98%, or 99% identity contains substitutions (e.g., conservative substitutions), insertions, or deletions relative to the reference sequence, but an antibody or antigen-binding fragment thereof comprising that sequence retains the ability to bind to same antigen as the parent (e.g., cancer associated antigen). In some embodiments, a total of 1 to 10 amino acids have been substituted, inserted and/or deleted in the amino acid sequence SEQ ID NO: 338. In some embodiments, the substitutions, insertions, or deletions occur in regions outside the CDRs (e.g., in the FRs). Optionally, the antibody or antigen-binding fragment thereof comprises the VL sequence SEQ ID NO: 338, including one or more post-translational modifications of that sequence. In a particular embodiment, the VL comprises one, two or three CDRs selected from: a. CDR-L1, comprising the amino acid sequence SEQ ID NO: 880, b. CDR-L2, comprising the amino acid sequence SEQ ID NO: 1422, and c. CDR-L3, comprising the amino acid sequence SEQ ID NO: 1964.

[1363] In one aspect, an antibody or antigen-binding fragment thereof is provided, wherein the antibody or antigen-binding fragment thereof comprises a VH as in any of the embodiments provided above, and a VL as in any of the embodiments provided above. In some embodiments, the antibody or antigen-binding fragment thereof comprises the VH amino acid sequence of SEQ ID NO: 67, and the VL amino acid sequence of SEQ ID NO: 338, optionally including post-translational modifications of those sequences.

### TBRE1055

[1364] In one aspect, the present disclosure provides an antibody or antigen-binding fragment thereof comprising at least one or both variable regions selected from: a. VH comprising the amino acid sequence of SEQ ID NO: 68 and b. VL comprising the amino acid sequence of SEQ ID NO: 339.

[1365] In one aspect, the present disclosure provides an antibody or antigen-binding fragment thereof comprising at least one, two, three, four, five, or six CDRs selected from: a. CDR-H1 comprising the amino acid sequence of SEQ ID NO: 610, b. CDR-H2 comprising the amino acid sequence of SEQ ID NO: 1152, c. CDR-H3 comprising the amino acid sequence of SEQ ID NO: 1694, d. CDR-L1 comprising the amino acid sequence of SEQ ID NO: 881, e. CDR-L2 comprising the amino acid sequence of SEQ ID NO: 1423, and f. CDR-L3 comprising the amino acid sequence of SEQ ID NO: 1965.

[1366] In one aspect, the present disclosure provides an antibody or antigen-binding fragment thereof comprising a CDR-H3 comprising the amino acid sequence of SEQ ID NO: 1694, and a CDR-L3 comprising the amino acid sequence of SEQ ID NO: 1965.

[1367] In one aspect, the present disclosure provides an antibody or antigen-binding fragment thereof comprising: a. CDR-H1 comprising the amino acid sequence of SEQ ID NO: 610, b. CDR-H2 comprising the amino acid sequence of SEQ ID NO: 1152, c. CDR-H3 comprising the amino acid sequence of SEQ ID NO: 1694, d. CDR-L1 comprising the amino acid sequence of SEQ ID NO: 881, e. CDR-L2 comprising the amino acid sequence of SEQ ID NO: 1423, and f. CDR-L3 comprising the amino acid sequence of SEQ ID NO: 1965.

[1368] In one aspect, the present disclosure provides an antibody or antigen-binding fragment thereof comprising at least one, at least two, or all three VH CDR sequences selected from: a. CDR-H1 comprising the amino acid sequence of SEQ ID NO: 610, b. CDR-H2 comprising the amino acid sequence of SEQ ID NO: 1152, c. CDR-H3 comprising the amino acid sequence of SEQ ID NO: 1694, and a VL comprising the amino acid sequence of SEQ ID NO: 339.

[1369] In one aspect, the present disclosure provides an antibody or antigen-binding fragment thereof comprising at least one, at least two, or all three VL CDR sequences selected from: a. CDR-L1 comprising the amino acid sequence of SEQ ID NO: 881, b. CDR-L2 comprising the amino acid sequence of SEQ ID NO: 1423, c. CDR-L3 comprising the amino acid sequence of SEQ ID NO: 1965, and a VH comprising the amino acid sequence of SEQ ID NO: 68.

[1370] In one aspect, an antibody or antigen-binding fragment thereof is provided, wherein the antibody or antigen-binding fragment thereof comprises a heavy chain variable domain (VH) having at least 90%, 91%, 92%, 93%, 94%, 95%, 96%, 97%, 98%, 99%, or 100% sequence identity to the amino acid sequence SEQ ID NO: 68. In some embodiments, a VH sequence having at least 90%, 91%, 92%, 93%, 94%, 95%, 96%, 97%, 98%, or 99% identity contains substitutions (e.g., conservative substitutions), insertions, or deletions relative to the reference sequence, but an antibody or antigen-binding fragment thereof comprising that sequence retains the ability to bind to same antigen as of the parent (e.g., cancer associated antigen). In some embodiments, a total of 1 to 10 amino acids have been substituted, inserted and/or deleted in the amino acid sequence SEQ ID NO: 68. In some embodiments, substitutions, insertions, or deletions occur in regions outside the CDRs (e.g., in the FRs). Optionally, the antibody or antigen-binding fragment thereof comprises the VH sequence SEQ ID NO: 68, including one or more post-translational modifications of that sequence. In a particular embodiment, the VH comprises one, two or three CDRs selected from: a. CDR-H1, comprising the amino acid sequence SEQ ID NO: 610, b. CDR-H2, comprising the amino acid sequence SEQ ID NO: 1152, and c. CDR-H3, comprising the amino acid sequence SEQ ID NO: 1694.

[1371] In one aspect, an antibody or antigen-binding fragment thereof is provided, wherein the antibody or antigen-binding fragment thereof comprises a light chain variable domain (VL) having at least 90%, 91%, 92%, 93%, 94%, 95%, 96%, 97%, 98%, 99%, or 100% sequence identity to the amino acid sequence SEQ ID NO: 339. In some embodiments, a VL sequence having at least 90%, 91%, 92%, 93%, 94%, 95%, 96%, 97%, 98%, or 99% identity contains substitutions (e.g., conservative substitutions), insertions, or deletions relative to the reference sequence, but an antibody or antigen-binding fragment thereof comprising that sequence retains the ability to bind to same antigen as the parent (e.g., cancer associated antigen). In some embodiments, a total of 1 to 10 amino acids have been substituted, inserted and/or deleted in the amino acid sequence SEQ ID NO: 339. In some embodiments, the substitutions, insertions, or deletions occur in regions outside the CDRs (e.g., in the FRs). Optionally, the antibody or antigen-binding fragment thereof comprises the VL sequence SEQ ID NO: 339, including one or more post-translational modifications of that sequence. In a particular embodiment, the VL comprises one, two or three CDRs selected from: a. CDR-L1, comprising the amino acid sequence SEQ ID NO: 881, b. CDR-L2, comprising the amino acid sequence SEQ ID NO: 1423, and c. CDR-L3, comprising the amino acid sequence SEQ ID NO: 1965.

[1372] In one aspect, an antibody or antigen-binding fragment thereof is provided, wherein the antibody or antigen-binding fragment thereof comprises a VH as in any of the embodiments provided above, and a VL as in any of the embodiments provided above. In some embodiments, the antibody or antigen-binding fragment thereof comprises the VH amino acid sequence of SEQ ID NO: 68, and the VL amino acid sequence of SEQ ID NO: 339, optionally including post-translational modifications of those sequences.

### TBRE1056

[1373] In one aspect, the present disclosure provides an antibody or antigen-binding fragment thereof comprising at least one or both variable regions selected from: a. VH comprising the amino acid sequence of SEQ ID NO: 69 and b. VL comprising the amino acid sequence of SEQ ID NO: 340.

[1374] In one aspect, the present disclosure provides an antibody or antigen-binding fragment thereof comprising a CDR-H3 comprising the amino acid sequence of SEQ ID NO: 1695 and a CDR-L3 comprising the amino acid sequence of SEQ ID NO: 1966.

[1375] In one aspect, the present disclosure provides an antibody or antigen-binding fragment thereof comprising: a. CDR-H1 comprising the amino acid sequence of SEQ ID NO: 611, b. CDR-H2 comprising the amino acid sequence of SEQ ID NO: 1153, c. CDR-H3 comprising the amino acid sequence of SEQ ID NO: 1695, d. CDR-L1 comprising the amino acid sequence of SEQ ID NO: 882, e. CDR-L2 comprising the amino acid sequence of SEQ ID NO: 1424, and f. CDR-L3 comprising the amino acid sequence of SEQ ID NO: 1966.

[1376] In one aspect, the present disclosure provides an antibody or antigen-binding fragment thereof comprising at least one, two, three, four, five, or six CDRs selected from: a. CDR-H1 comprising the amino acid sequence of SEQ ID NO: 611, b. CDR-H2 comprising the amino acid sequence of SEQ ID NO: 1153, c. CDR-H3 comprising the amino acid sequence of SEQ ID NO: 1695, d. CDR-L1 comprising the amino acid sequence of SEQ ID NO: 882, e. CDR-L2 comprising the amino acid sequence of SEQ ID NO: 1424, and f. CDR-L3 comprising the amino acid sequence of SEQ ID NO: 1966.

[1377] In one aspect, the present disclosure provides an antibody or antigen-binding fragment thereof comprising at least one, at least two, or all three VH CDR sequences selected from: a. CDR-H1 comprising the amino acid sequence of SEQ ID NO: 611, b. CDR-H2 comprising the amino acid sequence of SEQ ID NO: 1153, c. CDR-H3 comprising the amino acid sequence of SEQ ID NO: 1695, and a VL comprising the amino acid sequence of SEQ ID NO: 340.

[1378] In one aspect, the present disclosure provides an antibody or antigen-binding fragment thereof comprising at least one, at least two, or all three VL CDR sequences selected from: a. CDR-L1 comprising the amino acid sequence of SEQ ID NO: 882, b. CDR-L2 comprising the amino acid sequence of SEQ ID NO: 1424, c. CDR-L3 comprising the amino acid sequence of SEQ ID NO: 1966, and a VH comprising the amino acid sequence of SEQ ID NO: 69.

[1379] In one aspect, an antibody or antigen-binding fragment thereof is provided, wherein the antibody or antigen-binding fragment thereof comprises a heavy chain variable domain (VH) having at least 90%, 91%, 92%, 93%, 94%, 95%, 96%, 97%, 98%, 99%, or 100% sequence identity to the amino acid sequence SEQ ID NO: 69. In some embodiments, a VH sequence having at least 90%, 91%, 92%, 93%, 94%, 95%, 96%, 97%, 98%, or 99% identity contains substitutions (e.g., conservative substitutions), insertions, or deletions relative to the reference sequence, but an antibody or antigen-binding fragment thereof comprising that sequence retains the ability to bind to same antigen as of the parent (e.g., cancer associated antigen). In some embodiments, a total of 1 to 10 amino acids have been substituted, inserted and/or deleted in the amino acid sequence SEQ ID NO: 69. In some embodiments, substitutions, antigen-binding fragment thereof comprises the VH sequence SEQ ID NO: 69, including one or more post-translational modifications of that sequence. In a particular embodiment, the VH comprises one, two or three CDRs selected from: a. CDR-H1, comprising the amino acid sequence SEQ ID NO: 611, b. CDR-H2, comprising the amino acid sequence SEQ ID NO: 1153, and c. CDR-H3, comprising the amino acid sequence SEQ ID NO: 1695.

[1380] In one aspect, an antibody or antigen-binding fragment thereof is provided, wherein the antibody or antigen-binding fragment thereof comprises a light chain variable domain (VL) having at least 90%, 91%, 92%, 93%, 94%, 95%, 96%, 97%, 98%, 99%, or 100% sequence identity to the amino acid sequence SEQ ID NO: 340. In some embodiments, a VL sequence having at least 90%, 91%, 92%, 93%, 94%, 95%, 96%, 97%, 98%, or 99% identity contains substitutions (e.g., conservative substitutions), insertions, or deletions relative to the reference sequence, but an antibody or antigen-binding fragment thereof comprising that sequence retains the ability to bind to same antigen as the parent (e.g., cancer associated antigen). In some embodiments, a total of 1 to 10 amino acids have been substituted, inserted and/or deleted in the amino acid sequence SEQ ID NO: 340. In some embodiments, the substitutions, insertions, or deletions occur in regions outside the CDRs (e.g., in the FRs). Optionally, the antibody or antigen-binding fragment thereof comprises the VL sequence SEQ ID NO: 340, including one or more post-translational modifications of that sequence. In a particular embodiment, the VL comprises one, two or three CDRs selected from: a. CDR-L1, comprising the amino acid sequence SEQ ID NO: 882, b. CDR-L2, comprising the amino acid sequence SEQ ID NO: 1424, and c. CDR-L3, comprising the amino acid sequence SEQ ID NO: 1966.

[1381] In one aspect, an antibody or antigen-binding fragment thereof is provided, wherein the antibody or antigen-binding fragment thereof comprises a VH as in any of the embodiments provided above, and a VL as in any of the embodiments provided above. In some embodiments, the antibody or antigen-binding fragment thereof comprises the VH amino acid sequence of SEQ ID NO: 69, and the VL amino acid sequence of SEQ ID NO: 340, optionally including post-translational modifications of those sequences.

### TBRE1057

[1382] In one aspect, the present disclosure provides an antibody or antigen-binding fragment thereof comprising at least one or both variable regions selected from: a. VH comprising the amino acid sequence of SEQ ID NO: 70 and b. V_{L} comprising the amino acid sequence of SEQ ID NO: 341.

[1383] In one aspect, the present disclosure provides an antibody or antigen-binding fragment thereof comprising at least one, two, three, four, five, or six CDRs selected from: a. CDR-H1 comprising the amino acid sequence of SEQ ID NO: 612, b. CDR-H2 comprising the amino acid sequence of SEQ ID NO: 1154, c. CDR-H3 comprising the amino acid sequence of SEQ ID NO: 1696, d. CDR-L1 comprising the amino acid sequence of SEQ ID NO: 883, e. CDR-L2 comprising the amino acid sequence of SEQ ID NO: 1425, and f. CDR-L3 comprising the amino acid sequence of SEQ ID NO: 1967.

[1384] In one aspect, the present disclosure provides an antibody or antigen-binding fragment thereof comprising a CDR-H3 comprising the amino acid sequence of SEQ ID NO: 1696, and a CDR-L3 comprising the amino acid sequence of SEQ ID NO: 1967.

[1385] In one aspect, the present disclosure provides an antibody or antigen-binding fragment thereof comprising a CDR-H3 comprising the amino acid sequence of SEQ ID NO: 1696, and a CDR-L3 comprising the amino acid sequence of SEQ ID NO: 1967.

[1386] In one aspect, the present disclosure provides an antibody or antigen-binding fragment thereof comprising at least one, at least two, or all three VH CDR sequences selected from: a. CDR-H1 comprising the amino acid sequence of SEQ ID NO: 612, b. CDR-H2 comprising the amino acid sequence of SEQ ID NO: 1154, c. CDR-H3 comprising the amino acid sequence of SEQ ID NO: 1696, and a VL comprising the amino acid sequence of SEQ ID NO: 341.

[1387] In one aspect, the present disclosure provides an antibody or antigen-binding fragment thereof comprising at least one, at least two, or all three VL CDR sequences selected from: a. CDR-L1 comprising the amino acid sequence of SEQ ID NO: 883, b. CDR-L2 comprising the amino acid sequence of SEQ ID NO: 1425, c. CDR-L3 comprising the amino acid sequence of SEQ ID NO: 1967, and a VH comprising the amino acid sequence of SEQ ID NO: 70.

[1388] In one aspect, an antibody or antigen-binding fragment thereof is provided, wherein the antibody or antigen-binding fragment thereof comprises a heavy chain variable domain (VH) having at least 90%, 91%, 92%, 93%, 94%, 95%, 96%, 97%, 98%, 99%, or 100% sequence identity to the amino acid sequence SEQ ID NO: 70. In some embodiments, a VH sequence having at least 90%, 91%, 92%, 93%, 94%, 95%, 96%, 97%, 98%, or 99% identity contains substitutions (e.g., conservative substitutions), insertions, or deletions relative to the reference sequence, but an antibody or antigen-binding fragment thereof comprising that sequence retains the ability to bind to same antigen as of the parent (e.g., cancer associated antigen). In some embodiments, a total of 1 to 10 amino acids have been substituted, inserted and/or deleted in the amino acid sequence SEQ ID NO: 70. In some embodiments, substitutions, insertions, or deletions occur in regions outside the CDRs (e.g., in the FRs). Optionally, the antibody or antigen-binding fragment thereof comprises the VH sequence SEQ ID NO: 70, including one or more post-translational modifications of that sequence. In a particular embodiment, the VH comprises one, two or three CDRs selected from: a. CDR-H1, comprising the amino acid sequence SEQ ID NO: 612, b. CDR-H2, comprising the amino acid sequence SEQ ID NO: 1154, and c. CDR-H3, comprising the amino acid sequence SEQ ID NO: 1696.

[1389] In one aspect, an antibody or antigen-binding fragment thereof is provided, wherein the antibody or antigen-binding fragment thereof comprises a light chain variable domain (VL) having at least 90%, 91%, 92%, 93%, 94%, 95%, 96%, 97%, 98%, 99%, or 100% sequence identity to the amino acid sequence SEQ ID NO: 341. In some embodiments, a VL sequence having at least 90%, 91%, 92%, 93%, 94%, 95%, 96%, 97%, 98%, or 99% identity contains substitutions (e.g., conservative substitutions), insertions, or deletions relative to the reference sequence, but an antibody or antigen-binding fragment thereof comprising that sequence retains the ability to bind to same antigen as the parent (e.g., cancer associated antigen). In some embodiments, a total of 1 to 10 amino acids have been substituted, inserted and/or deleted in the amino acid sequence SEQ ID NO: 341. In some embodiments, the substitutions, antigen-binding fragment thereof comprises the VL sequence SEQ ID NO: 341, including one or more post-translational modifications of that sequence. In a particular embodiment, the VL comprises one, two or three CDRs selected from: a. CDR-L1, comprising the amino acid sequence SEQ ID NO: 883, b. CDR-L2, comprising the amino acid sequence SEQ ID NO: 1425, and c. CDR-L3, comprising the amino acid sequence SEQ ID NO: 1967.

[1390] In one aspect, an antibody or antigen-binding fragment thereof is provided, wherein the antibody or antigen-binding fragment thereof comprises a VH as in any of the embodiments provided above, and a VL as in any of the embodiments provided above. In some embodiments, the antibody or antigen-binding fragment thereof comprises the VH amino acid sequence of SEQ ID NO: 70, and the VL amino acid sequence of SEQ ID NO: 341, optionally including post-translational modifications of those sequences.

### TBRE1058

[1391] In one aspect, the present disclosure provides an antibody or antigen-binding fragment thereof comprising at least one or both variable regions selected from: a. VH comprising the amino acid sequence of SEQ ID NO: 71 and b. VL comprising the amino acid sequence of SEQ ID NO: 342.

[1392] In one aspect, the present disclosure provides an antibody or antigen-binding fragment thereof comprising at least one, two, three, four, five, or six CDRs selected from: a. CDR-H1 comprising the amino acid sequence of SEQ ID NO: 613, b. CDR-H2 comprising the amino acid sequence of SEQ ID NO: 1155, c. CDR-H3 comprising the amino acid sequence of SEQ ID NO: 1697, d. CDR-L1 comprising the amino acid sequence of SEQ ID NO: 884, e. CDR-L2 comprising the amino acid sequence of SEQ ID NO: 1426, and f. CDR-L3 comprising the amino acid sequence of SEQ ID NO: 1968.

[1393] In one aspect, the present disclosure provides an antibody or antigen-binding fragment thereof comprising a CDR-H3 comprising the amino acid sequence of SEQ ID NO: 1697, and a CDR-L3 comprising the amino acid sequence of SEQ ID NO: 1968.

[1394] In one aspect, the present disclosure provides an antibody or antigen-binding fragment thereof comprising: a. CDR-H1 comprising the amino acid sequence of SEQ ID NO: 613, b. CDR-H2 comprising the amino acid sequence of SEQ ID NO: 1155, c. CDR-H3 comprising the amino acid sequence of SEQ ID NO: 1697, d. CDR-L1 comprising the amino acid sequence of SEQ ID NO: 884, e. CDR-L2 comprising the amino acid sequence of SEQ ID NO: 1426, and f. CDR-L3 comprising the amino acid sequence of SEQ ID NO: 1968.

[1395] In one aspect, the present disclosure provides an antibody or antigen-binding fragment thereof comprising at least one, at least two, or all three VH CDR sequences selected from: a. CDR-H1 comprising the amino acid sequence of SEQ ID NO: 613, b. CDR-H2 comprising the amino acid sequence of SEQ ID NO: 1155, c. CDR-H3 comprising the amino acid sequence of SEQ ID NO: 1697, and a VL comprising the amino acid sequence of SEQ ID NO: 342.

[1396] In one aspect, the present disclosure provides an antibody or antigen-binding fragment thereof comprising at least one, at least two, or all three VL CDR sequences selected from: a. CDR-L1 comprising the amino acid sequence of SEQ ID NO: 884, b. CDR-L2 comprising the amino acid sequence of SEQ ID NO: 1426, c. CDR-L3 comprising the amino acid sequence of SEQ ID NO: 1968, and a VH comprising the amino acid sequence of SEQ ID NO: 71.

[1397] In one aspect, an antibody or antigen-binding fragment thereof is provided, wherein the antibody or antigen-binding fragment thereof comprises a heavy chain variable domain (VH) having at least 90%, 91%, 92%, 93%, 94%, 95%, 96%, 97%, 98%, 99%, or 100% sequence identity to the amino acid sequence SEQ ID NO: 71. In some embodiments, a VH sequence having at least 90%, 91%, 92%, 93%, 94%, 95%, 96%, 97%, 98%, or 99% identity contains substitutions (e.g., conservative substitutions), insertions, or deletions relative to the reference sequence, but an antibody or antigen-binding fragment thereof comprising that sequence retains the ability to bind to same antigen as of the parent (e.g., cancer associated antigen). In some embodiments, a total of 1 to 10 amino acids have been substituted, inserted and/or deleted in the amino acid sequence SEQ ID NO: 71. In some embodiments, substitutions, insertions, or deletions occur in regions outside the CDRs (e.g., in the FRs). Optionally, the antibody or antigen-binding fragment thereof comprises the VH sequence SEQ ID NO: 71, including one or more post-translational modifications of that sequence. In a particular embodiment, the VH comprises one, two or three CDRs selected from: a. CDR-H1, comprising the amino acid sequence SEQ ID NO: 613, b. CDR-H2, comprising the amino acid sequence SEQ ID NO: 1155, and c. CDR-H3, comprising the amino acid sequence SEQ ID NO: 1697.

[1398] In one aspect, an antibody or antigen-binding fragment thereof is provided, wherein the antibody or antigen-binding fragment thereof comprises a light chain variable domain (VL) having at least 90%, 91%, 92%, 93%, 94%, 95%, 96%, 97%, 98%, 99%, or 100% sequence identity to the amino acid sequence SEQ ID NO: 342. In some embodiments, a VL sequence having at least 90%, 91%, 92%, 93%, 94%, 95%, 96%, 97%, 98%, or 99% identity contains substitutions (e.g., conservative substitutions), insertions, or deletions relative to the reference sequence, but an antibody or antigen-binding fragment thereof comprising that sequence retains the ability to bind to same antigen as the parent (e.g., cancer associated antigen). In some embodiments, a total of 1 to 10 amino acids have been substituted, inserted and/or deleted in the amino acid sequence SEQ ID NO: 342. In some embodiments, the substitutions, insertions, or deletions occur in regions outside the CDRs (e.g., in the FRs). Optionally, the antibody or antigen-binding fragment thereof comprises the VL sequence SEQ ID NO: 342, including one or more post-translational modifications of that sequence. In a particular embodiment, the VL comprises one, two or three CDRs selected from: a. CDR-L1, comprising the amino acid sequence SEQ ID NO: 884, b. CDR-L2, comprising the amino acid sequence SEQ ID NO: 1426, and c. CDR-L3, comprising the amino acid sequence SEQ ID NO: 1968.

[1399] In one aspect, an antibody or antigen-binding fragment thereof is provided, wherein the antibody or antigen-binding fragment thereof comprises a VH as in any of the embodiments provided above, and a VL as in any of the embodiments provided above. In some embodiments, the antibody or antigen-binding fragment thereof comprises the VH amino acid sequence of SEQ ID NO: 71, and the VL amino acid sequence of SEQ ID NO: 342, optionally including post-translational modifications of those sequences.

### TCER1001

[1400] In one aspect, the present disclosure provides an antibody or antigen-binding fragment thereof comprising at least one or both variable regions selected from: a VH comprising the amino acid sequence of SEQ ID NO: 72 and b. VL comprising the amino acid sequence of SEQ ID NO: 343.

[1401] In one aspect, the present disclosure provides an antibody or antigen-binding fragment thereof comprising at least one, two, three, four, five, or six CDRs selected from: a. CDR-H1 comprising the amino acid sequence of SEQ ID NO: 614, b. CDR-H2 comprising the amino acid sequence of SEQ ID NO: 1156, c. CDR-H3 comprising the amino acid sequence of SEQ ID NO: 1698, d. CDR-L1 comprising the amino acid sequence of SEQ ID NO: 885, e. CDR-L2 comprising the amino acid sequence of SEQ ID NO: 1427, and f. CDR-L3 comprising the amino acid sequence of SEQ ID NO: 1969.

[1402] In one aspect, the present disclosure provides an antibody or antigen-binding fragment thereof comprising a CDR-H3 comprising the amino acid sequence of SEQ ID NO: 1698, and a CDR-L3 comprising the amino acid sequence of SEQ ID NO: 1969.

[1403] In one aspect, the present disclosure provides an antibody or antigen-binding fragment thereof comprising: a. CDR-H1 comprising the amino acid sequence of SEQ ID NO: 614, b. CDR-H2 comprising the amino acid sequence of SEQ ID NO: 1156, c. CDR-H3 comprising the amino acid sequence of SEQ ID NO: 1698, d. CDR-L1 comprising the amino acid sequence of SEQ ID NO: 885, e. CDR-L2 comprising the amino acid sequence of SEQ ID NO: 1427, and f. CDR-L3 comprising the amino acid sequence of SEQ ID NO: 1969.

[1404] In one aspect, the present disclosure provides an antibody or antigen-binding fragment thereof comprising at least one, at least two, or all three VH CDR sequences selected from: a. CDR-H1 comprising the amino acid sequence of SEQ ID NO: 614, b. CDR-H2 comprising the amino acid sequence of SEQ ID NO: 1156, c. CDR-H3 comprising the amino acid sequence of SEQ ID NO: 1698, and a VL comprising the amino acid sequence of SEQ ID NO: 343.

[1405] In one aspect, the present disclosure provides an antibody or antigen-binding fragment thereof comprising at least one, at least two, or all three VL CDR sequences selected from: a. CDR-L1 comprising the amino acid sequence of SEQ ID NO: 885, b. CDR-L2 comprising the amino acid sequence of SEQ ID NO: 1427, c. CDR-L3 comprising the amino acid sequence of SEQ ID NO: 1969, and a VH comprising the amino acid sequence of SEQ ID NO: 72.

[1406] In one aspect, an antibody or antigen-binding fragment thereof is provided, wherein the antibody or antigen-binding fragment thereof comprises a heavy chain variable domain (VH) having at least 90%, 91%, 92%, 93%, 94%, 95%, 96%, 97%, 98%, 99%, or 100% sequence identity to the amino acid sequence SEQ ID NO: 72. In some embodiments, a VH sequence having at least 90%, 91%, 92%, 93%, 94%, 95%, 96%, 97%, 98%, or 99% identity contains substitutions (e.g., conservative substitutions), insertions, or deletions relative to the reference sequence, but an antibody or antigen-binding fragment thereof comprising that sequence retains the ability to bind to same antigen as of the parent (e.g., cancer associated antigen). In some embodiments, a total of 1 to 10 amino acids have been substituted, inserted and/or deleted in the amino acid sequence SEQ ID NO: 72. In some embodiments, substitutions, insertions, or deletions occur in regions outside the CDRs (e.g., in the FRs). Optionally, the antibody or antigen-binding fragment thereof comprises the VH sequence SEQ ID NO: 72, including one or more post-translational modifications of that sequence. In a particular embodiment, the VH comprises one, two or three CDRs selected from: a. CDR-H1, comprising the amino acid sequence SEQ ID NO: 614, b. CDR-H2, comprising the amino acid sequence SEQ ID NO: 1156, and c. CDR-H3, comprising the amino acid sequence SEQ ID NO: 1698.

[1407] In one aspect, an antibody or antigen-binding fragment thereof is provided, wherein the antibody or antigen-binding fragment thereof comprises a light chain variable domain (VL) having at least 90%, 91%, 92%, 93%, 94%, 95%, 96%, 97%, 98%, 99%, or 100% sequence identity to the amino acid sequence SEQ ID NO: 343. In some embodiments, a VL sequence having at least 90%, 91%, 92%, 93%, 94%, 95%, 96%, 97%, 98%, or 99% identity contains substitutions (e.g., conservative substitutions), insertions, or deletions relative to the reference sequence, but an antibody or antigen-binding fragment thereof comprising that sequence retains the ability to bind to same antigen as the parent (e.g., cancer associated antigen). In some embodiments, a total of 1 to 10 amino acids have been substituted, inserted and/or deleted in the amino acid sequence SEQ ID NO: 343. In some embodiments, the substitutions, insertions, or deletions occur in regions outside the CDRs (e.g., in the FRs). Optionally, the antibody or antigen-binding fragment thereof comprises the VL sequence SEQ ID NO: 343, including one or more post-translational modifications of that sequence. In a particular embodiment, the VL comprises one, two or three CDRs selected from: a. CDR-L1, comprising the amino acid sequence SEQ ID NO: 885, b. CDR-L2, comprising the amino acid sequence SEQ ID NO: 1427, and c. CDR-L3, comprising the amino acid sequence SEQ ID NO: 1969.

[1408] In one aspect, an antibody or antigen-binding fragment thereof is provided, wherein the antibody or antigen-binding fragment thereof comprises a VH as in any of the embodiments provided above, and a VL as in any of the embodiments provided above. In some embodiments, the antibody or antigen-binding fragment thereof comprises the VH amino acid sequence of SEQ ID NO: 72, and the VL amino acid sequence of SEQ ID NO: 343, optionally including post-translational modifications of those sequences.

### TCER1002

[1409] In one aspect, the present disclosure provides an antibody or antigen-binding fragment thereof comprising at least one or both variable regions selected from: a. VH comprising the amino acid sequence of SEQ ID NO: 73 and b. V_{L} comprising the amino acid sequence of SEQ ID NO: 344.

[1410] In one aspect, the present disclosure provides an antibody or antigen-binding fragment thereof comprising at least one, two, three, four, five, or six CDRs selected from: a. CDR-H1 comprising the amino acid sequence of SEQ ID NO: 615, b. CDR-H2 comprising the amino acid sequence of SEQ ID NO: 1157, c. CDR-H3 comprising the amino acid sequence of SEQ ID NO: 1699, d. CDR-L1 comprising the amino acid sequence of SEQ ID NO: 886, e. CDR-L2 comprising the amino acid sequence of SEQ ID NO: 1428, and f. CDR-L3 comprising the amino acid sequence of SEQ ID NO: 1970.

[1411] In one aspect, the present disclosure provides an antibody or antigen-binding fragment thereof comprising a CDR-H3 comprising the amino acid sequence of SEQ ID NO: 1699, and a CDR-L3 comprising the amino acid sequence of SEQ ID NO: 1970.

[1412] In one aspect, the present disclosure provides an antibody or antigen-binding fragment thereof comprising: a. CDR-H1 comprising the amino acid sequence of SEQ ID NO: 615, b. CDR-H2 comprising the amino acid sequence of SEQ ID NO: 1157, c. CDR-H3 comprising the amino acid sequence of SEQ ID NO: 1699, d. CDR-L1 comprising the amino acid sequence of SEQ ID NO: 886, e. CDR-L2 comprising the amino acid sequence of SEQ ID NO: 1428, and f. CDR-L3 comprising the amino acid sequence of SEQ ID NO: 1970.

[1413] In one aspect, the present disclosure provides an antibody or antigen-binding fragment thereof comprising at least one, at least two, or all three VH CDR sequences selected from: a. CDR-H1 comprising the amino acid sequence of SEQ ID NO: 615, b. CDR-H2 comprising the amino acid sequence of SEQ ID NO: 1157, c. CDR-H3 comprising the amino acid sequence of SEQ ID NO: 1699, and a VL comprising the amino acid sequence of SEQ ID NO: 344.

[1414] In one aspect, the present disclosure provides an antibody or antigen-binding fragment thereof comprising at least one, at least two, or all three VL CDR sequences selected from: a. CDR-L1 comprising the amino acid sequence of SEQ ID NO: 886, b. CDR-L2 comprising the amino acid sequence of SEQ ID NO: 1428, c. CDR-L3 comprising the amino acid sequence of SEQ ID NO: 1970, and a VH comprising the amino acid sequence of SEQ ID NO: 73.

[1415] In one aspect, an antibody or antigen-binding fragment thereof is provided, wherein the antibody or antigen-binding fragment thereof comprises a heavy chain variable domain (VH) having at least 90%, 91%, 92%, 93%, 94%, 95%, 96%, 97%, 98%, 99%, or 100% sequence identity to the amino acid sequence SEQ ID NO: 73. In some embodiments, a VH sequence having at least 90%, 91%, 92%, 93%, 94%, 95%, 96%, 97%, 98%, or 99% identity contains substitutions (e.g., conservative substitutions), insertions, or deletions relative to the reference sequence, but an antibody or antigen-binding fragment thereof comprising that sequence retains the ability to bind to same antigen as of the parent (e.g., cancer associated antigen). In some embodiments, a total of 1 to 10 amino acids have been substituted, inserted and/or deleted in the amino acid sequence SEQ ID NO: 73. In some embodiments, substitutions, insertions, or deletions occur in regions outside the CDRs (e.g., in the FRs). Optionally, the antibody or antigen-binding fragment thereof comprises the VH sequence SEQ ID NO: 73, including one or more post-translational modifications of that sequence. In a particular embodiment, the VH comprises one, two or three CDRs selected from: a. CDR-H1, comprising the amino acid sequence SEQ ID NO: 615, b. CDR-H2, comprising the amino acid sequence SEQ ID NO: 1157, and c. CDR-H3, comprising the amino acid sequence SEQ ID NO: 1699.

[1416] In one aspect, an antibody or antigen-binding fragment thereof is provided, wherein the antibody or antigen-binding fragment thereof comprises a light chain variable domain (VL) having at least 90%, 91%, 92%, 93%, 94%, 95%, 96%, 97%, 98%, 99%, or 100% sequence identity to the amino acid sequence SEQ ID NO: 344. In some embodiments, a VL sequence having at least 90%, 91%, 92%, 93%, 94%, 95%, 96%, 97%, 98%, or 99% identity contains substitutions (e.g., conservative substitutions), insertions, or deletions relative to the reference sequence, but an antibody or antigen-binding fragment thereof comprising that sequence retains the ability to bind to same antigen as the parent (e.g., cancer associated antigen). In some embodiments, a total of 1 to 10 amino acids have been substituted, inserted and/or deleted in the amino acid sequence SEQ ID NO: 344. In some embodiments, the substitutions, insertions, or deletions occur in regions outside the CDRs (e.g., in the FRs). Optionally, the antibody or antigen-binding fragment thereof comprises the VL sequence SEQ ID NO: 344, including one or more post-translational modifications of that sequence. In a particular embodiment, the VL comprises one, two or three CDRs selected from: a. CDR-L1, comprising the amino acid sequence SEQ ID NO: 886, b. CDR-L2, comprising the amino acid sequence SEQ ID NO: 1428, and c. CDR-L3, comprising the amino acid sequence SEQ ID NO: 1970.

[1417] In one aspect, an antibody or antigen-binding fragment thereof is provided, wherein the antibody or antigen-binding fragment thereof comprises a VH as in any of the embodiments provided above, and a VL as in any of the embodiments provided above. In some embodiments, the antibody or antigen-binding fragment thereof comprises the VH amino acid sequence of SEQ ID NO: 73, and the VL amino acid sequence of SEQ ID NO: 344, optionally including post-translational modifications of those sequences.

### TCER1003

[1418] In one aspect, the present disclosure provides an antibody or antigen-binding fragment thereof comprising at least one or both variable regions selected from: a. VH comprising the amino acid sequence of SEQ ID NO: 74 and b. VL comprising the amino acid sequence of SEQ ID NO: 345.

[1419] In one aspect, the present disclosure provides an antibody or antigen-binding fragment thereof comprising at least one, two, three, four, five, or six CDRs selected from: a. CDR-H1 comprising the amino acid sequence of SEQ ID NO: 616, b. CDR-H2 comprising the amino acid sequence of SEQ ID NO: 1158, c. CDR-H3 comprising the amino acid sequence of SEQ ID NO: 1700, d. CDR-L1 comprising the amino acid sequence of SEQ ID NO: 887, e. CDR-L2 comprising the amino acid sequence of SEQ ID NO: 1429, and f. CDR-L3 comprising the amino acid sequence of SEQ ID NO: 1971.

[1420] In one aspect, the present disclosure provides an antibody or antigen-binding fragment thereof comprising a CDR-H3 comprising the amino acid sequence of SEQ ID NO: 1700, and a CDR-L3 comprising the amino acid sequence of SEQ ID NO: 1971.

[1421] In one aspect, the present disclosure provides an antibody or antigen-binding fragment thereof comprising: a. CDR-H1 comprising the amino acid sequence of SEQ ID NO: 616, b. CDR-H2 comprising the amino acid sequence of SEQ ID NO: 1158, c. CDR-H3 comprising the amino acid sequence of SEQ ID NO: 1700, d. CDR-L1 comprising the amino acid sequence of SEQ ID NO: 887, e. CDR-L2 comprising the amino acid sequence of SEQ ID NO: 1429, and f. CDR-L3 comprising the amino acid sequence of SEQ ID NO: 1971.

[1422] In one aspect, the present disclosure provides an antibody or antigen-binding fragment thereof comprising at least one, at least two, or all three VH CDR sequences selected from: a. CDR-H1 comprising the amino acid sequence of SEQ ID NO: 616, b. CDR-H2 comprising the amino acid sequence of SEQ ID NO: 1158, c. CDR-H3 comprising the amino acid sequence of SEQ ID NO: 1700, and a VL comprising the amino acid sequence of SEQ ID NO: 345.

[1423] In one aspect, the present disclosure provides an antibody or antigen-binding fragment thereof comprising at least one, at least two, or all three VL CDR sequences selected from: a. CDR-L1 comprising the amino acid sequence of SEQ ID NO: 887, b. CDR-L2 comprising the amino acid sequence of SEQ ID NO: 1429, c. CDR-L3 comprising the amino acid sequence of SEQ ID NO: 1971, and a VH comprising the amino acid sequence of SEQ ID NO: 74.

[1424] In one aspect, an antibody or antigen-binding fragment thereof is provided, wherein the antibody or antigen-binding fragment thereof comprises a heavy chain variable domain (VH) having at least 90%, 91%, 92%, 93%, 94%, 95%, 96%, 97%, 98%, 99%, or 100% sequence identity to the amino acid sequence SEQ ID NO: 74. In some embodiments, a VH sequence having at least 90%, 91%, 92%, 93%, 94%, 95%, 96%, 97%, 98%, or 99% identity contains substitutions (e.g., conservative substitutions), insertions, or deletions relative to the reference sequence, but an antibody or antigen-binding fragment thereof comprising that sequence retains the ability to bind to same antigen as of the parent (e.g., cancer associated antigen). In some embodiments, a total of 1 to 10 amino acids have been substituted, inserted and/or deleted in the amino acid sequence SEQ ID NO: 74. In some embodiments, substitutions, insertions, or deletions occur in regions outside the CDRs (e.g., in the FRs). Optionally, the antibody or antigen-binding fragment thereof comprises the VH sequence SEQ ID NO: 74, including one or more post-translational modifications of that sequence. In a particular embodiment, the VH comprises one, two or three CDRs selected from: a. CDR-H1, comprising the amino acid sequence SEQ ID NO: 616, b. CDR-H2, comprising the amino acid sequence SEQ ID NO: 1158, and c. CDR-H3, comprising the amino acid sequence SEQ ID NO: 1700.

[1425] In one aspect, an antibody or antigen-binding fragment thereof is provided, wherein the antibody or antigen-binding fragment thereof comprises a light chain variable domain (VL) having at least 90%, 91%, 92%, 93%, 94%, 95%, 96%, 97%, 98%, 99%, or 100% sequence identity to the amino acid sequence SEQ ID NO: 345. In some embodiments, a VL sequence having at least 90%, 91%, 92%, 93%, 94%, 95%, 96%, 97%, 98%, or 99% identity contains substitutions (e.g., conservative substitutions), insertions, or deletions relative to the reference sequence, but an antibody or antigen-binding fragment thereof comprising that sequence retains the ability to bind to same antigen as the parent (e.g., cancer associated antigen). In some embodiments, a total of 1 to 10 amino acids have been substituted, inserted and/or deleted in the amino acid sequence SEQ ID NO: 345. In some embodiments, the substitutions, insertions, or deletions occur in regions outside the CDRs (e.g., in the FRs). Optionally, the antibody or antigen-binding fragment thereof comprises the VL sequence SEQ ID NO: 345, including one or more post-translational modifications of that sequence. In a particular embodiment, the VL comprises one, two or three CDRs selected from: a. CDR-L1, comprising the amino acid sequence SEQ ID NO: 887, b. CDR-L2, comprising the amino acid sequence SEQ ID NO: 1429, and c. CDR-L3, comprising the amino acid sequence SEQ ID NO: 1971.

[1426] In one aspect, an antibody or antigen-binding fragment thereof is provided, wherein the antibody or antigen-binding fragment thereof comprises a VH as in any of the embodiments provided above, and a VL as in any of the embodiments provided above. In some embodiments, the antibody or antigen-binding fragment thereof comprises the VH amino acid sequence of SEQ ID NO: 74, and the VL amino acid sequence of SEQ ID NO: 345, optionally including post-translational modifications of those sequences.

### TCER1004

[1427] In one aspect, the present disclosure provides an antibody or antigen-binding fragment thereof comprising at least one or both variable regions selected from: a. VH comprising the amino acid sequence of SEQ ID NO: 75 and b. VL comprising the amino acid sequence of SEQ ID NO: 346.

[1428] In one aspect, the present disclosure provides an antibody or antigen-binding fragment thereof comprising at least one, two, three, four, five, or six CDRs selected from: a. CDR-H1 comprising the amino acid sequence of SEQ ID NO: 617, b. CDR-H2 comprising the amino acid sequence of SEQ ID NO: 1159, c. CDR-H3 comprising the amino acid sequence of SEQ ID NO: 1701, d. CDR-L1 comprising the amino acid sequence of SEQ ID NO: 888, e. CDR-L2 comprising the amino acid sequence of SEQ ID NO: 1430, and f. CDR-L3 comprising the amino acid sequence of SEQ ID NO: 1972.

[1429] In one aspect, the present disclosure provides an antibody or antigen-binding fragment thereof comprising a CDR-H3 comprising the amino acid sequence of SEQ ID NO: 1701, and a CDR-L3 comprising the amino acid sequence of SEQ ID NO: 1972.

[1430] In one aspect, the present disclosure provides an antibody or antigen-binding fragment thereof comprising: a. CDR-H1 comprising the amino acid sequence of SEQ ID NO: 617, b. CDR-H2 comprising the amino acid sequence of SEQ ID NO: 1159, c. CDR-H3 comprising the amino acid sequence of SEQ ID NO: 1701, d. CDR-L1 comprising the amino acid sequence of SEQ ID NO: 888, e. CDR-L2 comprising the amino acid sequence of SEQ ID NO: 1430, and f. CDR-L3 comprising the amino acid sequence of SEQ ID NO: 1972.

[1431] In one aspect, the present disclosure provides an antibody or antigen-binding fragment thereof comprising at least one, at least two, or all three VH CDR sequences selected from: a. CDR-H1 comprising the amino acid sequence of SEQ ID NO: 617, b. CDR-H2 comprising the amino acid sequence of SEQ ID NO: 1159, c. CDR-H3 comprising the amino acid sequence of SEQ ID NO: 1701, and a VL comprising the amino acid sequence of SEQ ID NO: 346.

[1432] In one aspect, the present disclosure provides an antibody or antigen-binding fragment thereof comprising at least one, at least two, or all three VL CDR sequences selected from: a. CDR-L1 comprising the amino acid sequence of SEQ ID NO: 888, b. CDR-L2 comprising the amino acid sequence of SEQ ID NO: 1430, c. CDR-L3 comprising the amino acid sequence of SEQ ID NO: 1972, and a VH comprising the amino acid sequence of SEQ ID NO: 75.

[1433] In one aspect, an antibody or antigen-binding fragment thereof is provided, wherein the antibody or antigen-binding fragment thereof comprises a heavy chain variable domain (VH) having at least 90%, 91%, 92%, 93%, 94%, 95%, 96%, 97%, 98%, 99%, or 100% sequence identity to the amino acid sequence SEQ ID NO: 75. In some embodiments, a VH sequence having at least 90%, 91%, 92%, 93%, 94%, 95%, 96%, 97%, 98%, or 99% identity contains substitutions (e.g., conservative substitutions), insertions, or deletions relative to the reference sequence, but an antibody or antigen-binding fragment thereof comprising that sequence retains the ability to bind to same antigen as of the parent (e.g., cancer associated antigen). In some embodiments, a total of 1 to 10 amino acids have been substituted, inserted and/or deleted in the amino acid sequence SEQ ID NO: 75. In some embodiments, substitutions, insertions, or deletions occur in regions outside the CDRs (e.g., in the FRs). Optionally, the antibody or antigen-binding fragment thereof comprises the VH sequence SEQ ID NO: 75, including one or more post-translational modifications of that sequence. In a particular embodiment, the VH comprises one, two or three CDRs selected from: a. CDR-H1, comprising the amino acid sequence SEQ ID NO: 617, b. CDR-H2, comprising the amino acid sequence SEQ ID NO: 1159, and c. CDR-H3, comprising the amino acid sequence SEQ ID NO: 1701.

[1434] In one aspect, an antibody or antigen-binding fragment thereof is provided, wherein the antibody or antigen-binding fragment thereof comprises a light chain variable domain (VL) having at least 90%, 91%, 92%, 93%, 94%, 95%, 96%, 97%, 98%, 99%, or 100% sequence identity to the amino acid sequence SEQ ID NO: 346. In some embodiments, a VL sequence having at least 90%, 91%, 92%, 93%, 94%, 95%, 96%, 97%, 98%, or 99% identity contains substitutions (e.g., conservative substitutions), insertions, or deletions relative to the reference sequence, but an antibody or antigen-binding fragment thereof comprising that sequence retains the ability to bind to same antigen as the parent (e.g., cancer associated antigen). In some embodiments, a total of 1 to 10 amino acids have been substituted, inserted and/or deleted in the amino acid sequence SEQ ID NO: 346. In some embodiments, the substitutions, insertions, or deletions occur in regions outside the CDRs (e.g., in the FRs). Optionally, the antibody or antigen-binding fragment thereof comprises the VL sequence SEQ ID NO: 346, including one or more post-translational modifications of that sequence. In a particular embodiment, the VL comprises one, two or three CDRs selected from: a CDR-L1, comprising the amino acid sequence SEQ ID NO: 888, b. CDR-L2, comprising the amino acid sequence SEQ ID NO: 1430, and c. CDR-L3, comprising the amino acid sequence SEQ ID NO: 1972.

[1435] In one aspect, an antibody or antigen-binding fragment thereof is provided, wherein the antibody or antigen-binding fragment thereof comprises a VH as in any of the embodiments provided above, and a VL as in any of the embodiments provided above. In some embodiments, the antibody or antigen-binding fragment thereof comprises the VH amino acid sequence of SEQ ID NO: 75, and the VL amino acid sequence of SEQ ID NO: 346, optionally including post-translational modifications of those sequences.

### TCER1005

[1436] In one aspect, the present disclosure provides an antibody or antigen-binding fragment thereof comprising at least one or both variable regions selected from: a. VH comprising the amino acid sequence of SEQ ID NO: 76 and b. VL comprising the amino acid sequence of SEQ ID NO: 347.

[1437] In one aspect, the present disclosure provides an antibody or antigen-binding fragment thereof comprising at least one, two, three, four, five, or six CDRs selected from: a. CDR-H1 comprising the amino acid sequence of SEQ ID NO: 618, b. CDR-H2 comprising the amino acid sequence of SEQ ID NO: 1160, c. CDR-H3 comprising the amino acid sequence of SEQ ID NO: 1702, d. CDR-L1 comprising the amino acid sequence of SEQ ID NO: 889, e. CDR-L2 comprising the amino acid sequence of SEQ ID NO: 1431, f. CDR-L3 comprising the amino acid sequence of SEQ ID NO: 1973.

[1438] In one aspect, the present disclosure provides an antibody or antigen-binding fragment thereof comprising a CDR-H3 comprising the amino acid sequence of SEQ ID NO: 1702, and a CDR-L3 comprising the amino acid sequence of SEQ ID NO: 1973.

[1439] In one aspect, the present disclosure provides an antibody or antigen-binding fragment thereof comprising: a. CDR-H1 comprising the amino acid sequence of SEQ ID NO: 618, b. CDR-H2 comprising the amino acid sequence of SEQ ID NO: 1160, c. CDR-H3 comprising the amino acid sequence of SEQ ID NO: 1702, d. CDR-L1 comprising the amino acid sequence of SEQ ID NO: 889, e. CDR-L2 comprising the amino acid sequence of SEQ ID NO: 1431, f. CDR-L3 comprising the amino acid sequence of SEQ ID NO: 1973.

[1440] In one aspect, the present disclosure provides an antibody or antigen-binding fragment thereof comprising at least one, at least two, or all three VH CDR sequences selected from: a. CDR-H1 comprising the amino acid sequence of SEQ ID NO: 618, b. CDR-H2 comprising the amino acid sequence of SEQ ID NO: 1160, c. CDR-H3 comprising the amino acid sequence of SEQ ID NO: 1702, and a VL comprising the amino acid sequence of SEQ ID NO: 347.

[1441] In one aspect, the present disclosure provides an antibody or antigen-binding fragment thereof comprising at least one, at least two, or all three VL CDR sequences selected from: a. CDR-L1 comprising the amino acid sequence of SEQ ID NO: 889, b. CDR-L2 comprising the amino acid sequence of SEQ ID NO: 1431, c. CDR-L3 comprising the amino acid sequence of SEQ ID NO: 1973, and a VH comprising the amino acid sequence of SEQ ID NO: 76.

[1442] In one aspect, an antibody or antigen-binding fragment thereof is provided, wherein the antibody or antigen-binding fragment thereof comprises a heavy chain variable domain (VH) having at least 90%, 91%, 92%, 93%, 94%, 95%, 96%, 97%, 98%, 99%, or 100% sequence identity to the amino acid sequence SEQ ID NO: 76. In some embodiments, a VH sequence having at least 90%, 91%, 92%, 93%, 94%, 95%, 96%, 97%, 98%, or 99% identity contains substitutions (e.g., conservative substitutions), insertions, or deletions relative to the reference sequence, but an antibody or antigen-binding fragment thereof comprising that sequence retains the ability to bind to same antigen as of the parent (e.g., cancer associated antigen). In some embodiments, a total of 1 to 10 amino acids have been substituted, inserted and/or deleted in the amino acid sequence SEQ ID NO: 76. In some embodiments, substitutions, insertions, or deletions occur in regions outside the CDRs (e.g., in the FRs). Optionally, the antibody or antigen-binding fragment thereof comprises the VH sequence SEQ ID NO: 76, including one or more post-translational modifications of that sequence. In a particular embodiment, the VH comprises one, two or three CDRs selected from: a. CDR-H1, comprising the amino acid sequence SEQ ID NO: 618, b. CDR-H2, comprising the amino acid sequence SEQ ID NO: 1160, and c. CDR-H3, comprising the amino acid sequence SEQ ID NO: 1702.

[1443] In one aspect, an antibody or antigen-binding fragment thereof is provided, wherein the antibody or antigen-binding fragment thereof comprises a light chain variable domain (VL) having at least 90%, 91%, 92%, 93%, 94%, 95%, 96%, 97%, 98%, 99%, or 100% sequence identity to the amino acid sequence SEQ ID NO: 347. In some embodiments, a VL sequence having at least 90%, 91%, 92%, 93%, 94%, 95%, 96%, 97%, 98%, or 99% identity contains substitutions (e.g., conservative substitutions), insertions, or deletions relative to the reference sequence, but an antibody or antigen-binding fragment thereof comprising that sequence retains the ability to bind to same antigen as the parent (e.g., cancer associated antigen). In some embodiments, a total of 1 to 10 amino acids have been substituted, inserted and/or deleted in the amino acid sequence SEQ ID NO: 347. In some embodiments, the substitutions, insertions, or deletions occur in regions outside the CDRs (e.g., in the FRs). Optionally, the antibody or antigen-binding fragment thereof comprises the VL sequence SEQ ID NO: 347, including one or more post-translational modifications of that sequence. In a particular embodiment, the VL comprises one, two or three CDRs selected from: a. CDR-L1, comprising the amino acid sequence SEQ ID NO: 889, b. CDR-L2, comprising the amino acid sequence SEQ ID NO: 1431, and c. CDR-L3, comprising the amino acid sequence SEQ ID NO: 1973.

[1444] In one aspect, an antibody or antigen-binding fragment thereof is provided, wherein the antibody or antigen-binding fragment thereof comprises a VH as in any of the embodiments provided above, and a VL as in any of the embodiments provided above. In some embodiments, the antibody or antigen-binding fragment thereof comprises the VH amino acid sequence of SEQ ID NO: 76, and the VL amino acid sequence of SEQ ID NO: 347, optionally including post-translational modifications of those sequences.

### TCER1006

[1445] In one aspect, the present disclosure provides an antibody or antigen-binding fragment thereof comprising at least one or both variable regions selected from: a. VH comprising the amino acid sequence of SEQ ID NO: 77 and b. VL comprising the amino acid sequence of SEQ ID NO: 348.

[1446] In one aspect, the present disclosure provides an antibody or antigen-binding fragment thereof comprising at least one, two, three, four, five, or six CDRs selected from: a. CDR-H1 comprising the amino acid sequence of SEQ ID NO: 619, b. CDR-H2 comprising the amino acid sequence of SEQ ID NO: 1161, c. CDR-H3 comprising the amino acid sequence of SEQ ID NO: 1703, d. CDR-L1 comprising the amino acid sequence of SEQ ID NO: 890, e. CDR-L2 comprising the amino acid sequence of SEQ ID NO: 1432, and f. CDR-L3 comprising the amino acid sequence of SEQ ID NO: 1974.

[1447] In one aspect, the present disclosure provides an antibody or antigen-binding fragment thereof comprising a CDR-H3 comprising the amino acid sequence of SEQ ID NO: 1703, and a CDR-L3 comprising the amino acid sequence of SEQ ID NO: 1974.

[1448] In one aspect, the present disclosure provides an antibody or antigen-binding fragment thereof comprising: a. CDR-H1 comprising the amino acid sequence of SEQ ID NO: 619, b. CDR-H2 comprising the amino acid sequence of SEQ ID NO: 1161, c. CDR-H3 comprising the amino acid sequence of SEQ ID NO: 1703, d. CDR-L1 comprising the amino acid sequence of SEQ ID NO: 890, e. CDR-L2 comprising the amino acid sequence of SEQ ID NO: 1432, and f. CDR-L3 comprising the amino acid sequence of SEQ ID NO: 1974.

[1449] In one aspect, the present disclosure provides an antibody or antigen-binding fragment thereof comprising at least one, at least two, or all three VH CDR sequences selected from: a. CDR-H1 comprising the amino acid sequence of SEQ ID NO: 619, b. CDR-H2 comprising the amino acid sequence of SEQ ID NO: 1161, c. CDR-H3 comprising the amino acid sequence of SEQ ID NO: 1703, and a VL comprising the amino acid sequence of SEQ ID NO: 348.

[1450] In one aspect, the present disclosure provides an antibody or antigen-binding fragment thereof comprising at least one, at least two, or all three VL CDR sequences selected from: a. CDR-L1 comprising the amino acid sequence of SEQ ID NO: 890, b. CDR-L2 comprising the amino acid sequence of SEQ ID NO: 1432, c. CDR-L3 comprising the amino acid sequence of SEQ ID NO: 1974, and a VH comprising the amino acid sequence of SEQ ID NO: 77.

[1451] In one aspect, an antibody or antigen-binding fragment thereof is provided, wherein the antibody or antigen-binding fragment thereof comprises a heavy chain variable domain (VH) having at least 90%, 91%, 92%, 93%, 94%, 95%, 96%, 97%, 98%, 99%, or 100% sequence identity to the amino acid sequence SEQ ID NO: 77. In some embodiments, a VH sequence having at least 90%, 91%, 92%, 93%, 94%, 95%, 96%, 97%, 98%, or 99% identity contains substitutions (e.g., conservative substitutions), insertions, or deletions relative to the reference sequence, but an antibody or antigen-binding fragment thereof comprising that sequence retains the ability to bind to same antigen as of the parent (e.g., cancer associated antigen). In some embodiments, a total of 1 to 10 amino acids have been substituted, inserted and/or deleted in the amino acid sequence SEQ ID NO: 77. In some embodiments, substitutions, insertions, or deletions occur in regions outside the CDRs (e.g., in the FRs). Optionally, the antibody or antigen-binding fragment thereof comprises the VH sequence SEQ ID NO: 77, including one or more post-translational modifications of that sequence. In a particular embodiment, the VH comprises one, two or three CDRs selected from: a. CDR-H1, comprising the amino acid sequence SEQ ID NO: 619, b. CDR-H2, comprising the amino acid sequence SEQ ID NO: 1161, and c. CDR-H3, comprising the amino acid sequence SEQ ID NO: 1703.

[1452] In one aspect, an antibody or antigen-binding fragment thereof is provided, wherein the antibody or antigen-binding fragment thereof comprises a light chain variable domain (VL) having at least 90%, 91%, 92%, 93%, 94%, 95%, 96%, 97%, 98%, 99%, or 100% sequence identity to the amino acid sequence SEQ ID NO: 348. In some embodiments, a VL sequence having at least 90%, 91%, 92%, 93%, 94%, 95%, 96%, 97%, 98%, or 99% identity contains substitutions (e.g., conservative substitutions), insertions, or deletions relative to the reference sequence, but an antibody or antigen-binding fragment thereof comprising that sequence retains the ability to bind to same antigen as the parent (e.g., cancer associated antigen). In some embodiments, a total of 1 to 10 amino acids have been substituted, inserted and/or deleted in the amino acid sequence SEQ ID NO: 348. In some embodiments, the substitutions, insertions, or deletions occur in regions outside the CDRs (e.g., in the FRs). Optionally, the antibody or antigen-binding fragment thereof comprises the VL sequence SEQ ID NO: 348, including one or more post-translational modifications of that sequence. In a particular embodiment, the VL comprises one, two or three CDRs selected from: a. CDR-L1, comprising the amino acid sequence SEQ ID NO: 890, b. CDR-L2, comprising the amino acid sequence SEQ ID NO: 1432, and c. CDR-L3, comprising the amino acid sequence SEQ ID NO: 1974.

[1453] In one aspect, an antibody or antigen-binding fragment thereof is provided, wherein the antibody or antigen-binding fragment thereof comprises a VH as in any of the embodiments provided above, and a VL as in any of the embodiments provided above. In some embodiments, the antibody or antigen-binding fragment thereof comprises the VH amino acid sequence of SEQ ID NO: 77, and the VL amino acid sequence of SEQ ID NO: 348, optionally including post-translational modifications of those sequences.

### TCER1007

[1454] In one aspect, the present disclosure provides an antibody or antigen-binding fragment thereof comprising at least one or both variable regions selected from: a. VH comprising the amino acid sequence of SEQ ID NO: 78 and b. VL comprising the amino acid sequence of SEQ ID NO: 349.

[1455] In one aspect, the present disclosure provides an antibody or antigen-binding fragment thereof comprising at least one, two, three, four, five, or six CDRs selected from: a. CDR-H1 comprising the amino acid sequence of SEQ ID NO: 620, b. CDR-H2 comprising the amino acid sequence of SEQ ID NO: 1162, c. CDR-H3 comprising the amino acid sequence of SEQ ID NO: 1704, d. CDR-L1 comprising the amino acid sequence of SEQ ID NO: 891, e. CDR-L2 comprising the amino acid sequence of SEQ ID NO: 1433, and f. CDR-L3 comprising the amino acid sequence of SEQ ID NO: 1975.

[1456] In one aspect, the present disclosure provides an antibody or antigen-binding fragment thereof comprising a CDR-H3 comprising the amino acid sequence of SEQ ID NO: 1704, and a CDR-L3 comprising the amino acid sequence of SEQ ID NO: 1975.

[1457] In one aspect, the present disclosure provides an antibody or antigen-binding fragment thereof comprising: a. CDR-H1 comprising the amino acid sequence of SEQ ID NO: 620, b. CDR-H2 comprising the amino acid sequence of SEQ ID NO: 1162, c. CDR-H3 comprising the amino acid sequence of SEQ ID NO: 1704, d. CDR-L1 comprising the amino acid sequence of SEQ ID NO: 891, e. CDR-L2 comprising the amino acid sequence of SEQ ID NO: 1433, and f. CDR-L3 comprising the amino acid sequence of SEQ ID NO: 1975.

[1458] In one aspect, the present disclosure provides an antibody or antigen-binding fragment thereof comprising at least one, at least two, or all three VH CDR sequences selected from: a. CDR-H1 comprising the amino acid sequence of SEQ ID NO: 620, b. CDR-H2 comprising the amino acid sequence of SEQ ID NO: 1162, c. CDR-H3 comprising the amino acid sequence of SEQ ID NO: 1704, and a VL comprising the amino acid sequence of SEQ ID NO: 349.

[1459] In one aspect, the present disclosure provides an antibody or antigen-binding fragment thereof comprising at least one, at least two, or all three VL CDR sequences selected from: a. CDR-L1 comprising the amino acid sequence of SEQ ID NO: 891, b. CDR-L2 comprising the amino acid sequence of SEQ ID NO: 1433, c. CDR-L3 comprising the amino acid sequence of SEQ ID NO: 1975, and a VH comprising the amino acid sequence of SEQ ID NO: 78.

[1460] In one aspect, an antibody or antigen-binding fragment thereof is provided, wherein the antibody or antigen-binding fragment thereof comprises a heavy chain variable domain (VH) having at least 90%, 91%, 92%, 93%, 94%, 95%, 96%, 97%, 98%, 99%, or 100% sequence identity to the amino acid sequence SEQ ID NO: 78. In some embodiments, a VH sequence having at least 90%, 91%, 92%, 93%, 94%, 95%, 96%, 97%, 98%, or 99% identity contains substitutions (e.g., conservative substitutions), insertions, or deletions relative to the reference sequence, but an antibody or antigen-binding fragment thereof comprising that sequence retains the ability to bind to same antigen as of the parent (e.g., cancer associated antigen). In some embodiments, a total of 1 to 10 amino acids have been substituted, inserted and/or deleted in the amino acid sequence SEQ ID NO: 78. In some embodiments, substitutions, insertions, or deletions occur in regions outside the CDRs (e.g., in the FRs). Optionally, the antibody or antigen-binding fragment thereof comprises the VH sequence SEQ ID NO: 78, including one or more post-translational modifications of that sequence. In a particular embodiment, the VH comprises one, two or three CDRs selected from: a. CDR-H1, comprising the amino acid sequence SEQ ID NO: 620, b. CDR-H2, comprising the amino acid sequence SEQ ID NO: 1162, and c. CDR-H3, comprising the amino acid sequence SEQ ID NO: 1704.

[1461] In one aspect, an antibody or antigen-binding fragment thereof is provided, wherein the antibody or antigen-binding fragment thereof comprises a light chain variable domain (VL) having at least 90%, 91%, 92%, 93%, 94%, 95%, 96%, 97%, 98%, 99%, or 100% sequence identity to the amino acid sequence SEQ ID NO: 349. In some embodiments, a VL sequence having at least 90%, 91%, 92%, 93%, 94%, 95%, 96%, 97%, 98%, or 99% identity contains substitutions (e.g., conservative substitutions), insertions, or deletions relative to the reference sequence, but an antibody or antigen-binding fragment thereof comprising that sequence retains the ability to bind to same antigen as the parent (e.g., cancer associated antigen). In some embodiments, a total of 1 to 10 amino acids have been substituted, inserted and/or deleted in the amino acid sequence SEQ ID NO: 349. In some embodiments, the substitutions, insertions, or deletions occur in regions outside the CDRs (e.g., in the FRs). Optionally, the antibody or antigen-binding fragment thereof comprises the VL sequence SEQ ID NO: 349, including one or more post-translational modifications of that sequence. In a particular embodiment, the VL comprises one, two or three CDRs selected from: a. CDR-L1, comprising the amino acid sequence SEQ ID NO: 891, b. CDR-L2, comprising the amino acid sequence SEQ ID NO: 1433, and c. CDR-L3, comprising the amino acid sequence SEQ ID NO: 1975.

[1462] In one aspect, an antibody or antigen-binding fragment thereof is provided, wherein the antibody or antigen-binding fragment thereof comprises a VH as in any of the embodiments provided above, and a VL as in any of the embodiments provided above. In some embodiments, the antibody or antigen-binding fragment thereof comprises the VH amino acid sequence of SEQ ID NO: 78, and the VL amino acid sequence of SEQ ID NO: 349, optionally including post-translational modifications of those sequences.

### TCHO1001

[1463] In one aspect, the present disclosure provides an antibody or antigen-binding fragment thereof comprising at least one or both variable regions selected from: a. VH comprising the amino acid sequence of SEQ ID NO: 79 and b. VL comprising the amino acid sequence of SEQ ID NO: 350.

[1464] In one aspect, the present disclosure provides an antibody or antigen-binding fragment thereof comprising at least one, two, three, four, five, or six CDRs selected from: a. CDR-H1 comprising the amino acid sequence of SEQ ID NO: 621, b. CDR-H2 comprising the amino acid sequence of SEQ ID NO: 1163, c. CDR-H3 comprising the amino acid sequence of SEQ ID NO: 1705, d. CDR-L1 comprising the amino acid sequence of SEQ ID NO: 892, e. CDR-L2 comprising the amino acid sequence of SEQ ID NO: 1434, and f. CDR-L3 comprising the amino acid sequence of SEQ ID NO: 1976.

[1465] In one aspect, the present disclosure provides an antibody or antigen-binding fragment thereof comprising a CDR-H3 comprising the amino acid sequence of SEQ ID NO: 1705, and a CDR-L3 comprising the amino acid sequence of SEQ ID NO: 1976.

[1466] In one aspect, the present disclosure provides an antibody or antigen-binding fragment thereof comprising: a. CDR-H1 comprising the amino acid sequence of SEQ ID NO: 621, b. CDR-H2 comprising the amino acid sequence of SEQ ID NO: 1163, c. CDR-H3 comprising the amino acid sequence of SEQ ID NO: 1705, d. CDR-L1 comprising the amino acid sequence of SEQ ID NO: 892, e. CDR-L2 comprising the amino acid sequence of SEQ ID NO: 1434, and f. CDR-L3 comprising the amino acid sequence of SEQ ID NO: 1976.

[1467] In one aspect, the present disclosure provides an antibody or antigen-binding fragment thereof comprising at least one, at least two, or all three VH CDR sequences selected from: a. CDR-H1 comprising the amino acid sequence of SEQ ID NO: 621, b. CDR-H2 comprising the amino acid sequence of SEQ ID NO: 1163, c. CDR-H3 comprising the amino acid sequence of SEQ ID NO: 1705, and a VL comprising the amino acid sequence of SEQ ID NO: 350.

[1468] In one aspect, the present disclosure provides an antibody or antigen-binding fragment thereof comprising at least one, at least two, or all three VL CDR sequences selected from: a. CDR-L1 comprising the amino acid sequence of SEQ ID NO: 892, b. CDR-L2 comprising the amino acid sequence of SEQ ID NO: 1434, c. CDR-L3 comprising the amino acid sequence of SEQ ID NO: 1976, and a VH comprising the amino acid sequence of SEQ ID NO: 79.

[1469] In one aspect, an antibody or antigen-binding fragment thereof is provided, wherein the antibody or antigen-binding fragment thereof comprises a heavy chain variable domain (VH) having at least 90%, 91%, 92%, 93%, 94%, 95%, 96%, 97%, 98%, 99%, or 100% sequence identity to the amino acid sequence SEQ ID NO: 79. In some embodiments, a VH sequence having at least 90%, 91%, 92%, 93%, 94%, 95%, 96%, 97%, 98%, or 99% identity contains substitutions (e.g., conservative substitutions), insertions, or deletions relative to the reference sequence, but an antibody or antigen-binding fragment thereof comprising that sequence retains the ability to bind to same antigen as of the parent (e.g., cancer associated antigen). In some embodiments, a total of 1 to 10 amino acids have been substituted, inserted and/or deleted in the amino acid sequence SEQ ID NO: 79. In some embodiments, substitutions, antigen-binding fragment thereof comprises the VH sequence SEQ ID NO: 79, including one or more post-translational modifications of that sequence. In a particular embodiment, the VH comprises one, two or three CDRs selected from: a. CDR-H1, comprising the amino acid sequence SEQ ID NO: 621, b. CDR-H2, comprising the amino acid sequence SEQ ID NO: 1163, and c. CDR-H3, comprising the amino acid sequence SEQ ID NO: 1705.

[1470] In one aspect, an antibody or antigen-binding fragment thereof is provided, wherein the antibody or antigen-binding fragment thereof comprises a light chain variable domain (VL) having at least 90%, 91%, 92%, 93%, 94%, 95%, 96%, 97%, 98%, 99%, or 100% sequence identity to the amino acid sequence SEQ ID NO: 350. In some embodiments, a VL sequence having at least 90%, 91%, 92%, 93%, 94%, 95%, 96%, 97%, 98%, or 99% identity contains substitutions (e.g., conservative substitutions), insertions, or deletions relative to the reference sequence, but an antibody or antigen-binding fragment thereof comprising that sequence retains the ability to bind to same antigen as the parent (e.g., cancer associated antigen). In some embodiments, a total of 1 to 10 amino acids have been substituted, inserted and/or deleted in the amino acid sequence SEQ ID NO: 350. In some embodiments, the substitutions, insertions, or deletions occur in regions outside the CDRs (e.g., in the FRs). Optionally, the antibody or antigen-binding fragment thereof comprises the VL sequence SEQ ID NO: 350, including one or more post-translational modifications of that sequence. In a particular embodiment, the VL comprises one, two or three CDRs selected from: a. CDR-L1, comprising the amino acid sequence SEQ ID NO: 892, b. CDR-L2, comprising the amino acid sequence SEQ ID NO: 1434, and c. CDR-L3, comprising the amino acid sequence SEQ ID NO: 1976.

[1471] In one aspect, an antibody or antigen-binding fragment thereof is provided, wherein the antibody or antigen-binding fragment thereof comprises a VH as in any of the embodiments provided above, and a VL as in any of the embodiments provided above. In some embodiments, the antibody or antigen-binding fragment thereof comprises the VH amino acid sequence of SEQ ID NO: 79, and the VL amino acid sequence of SEQ ID NO: 350, optionally including post-translational modifications of those sequences.

### TCOL1001

[1472] In one aspect, the present disclosure provides an antibody or antigen-binding fragment thereof comprising at least one or both variable regions selected from: a. VH comprising the amino acid sequence of SEQ ID NO: 80 and b. VL comprising the amino acid sequence of SEQ ID NO: 351.

[1473] In one aspect, the present disclosure provides an antibody or antigen-binding fragment thereof comprising at least one, two, three, four, five, or six CDRs selected from: a. CDR-H1 comprising the amino acid sequence of SEQ ID NO: 622, b. CDR-H2 comprising the amino acid sequence of SEQ ID NO: 1164, c. CDR-H3 comprising the amino acid sequence of SEQ ID NO: 1706, d. CDR-L1 comprising the amino acid sequence of SEQ ID NO: 893, e. CDR-L2 comprising the amino acid sequence of SEQ ID NO: 1435, and f. CDR-L3 comprising the amino acid sequence of SEQ ID NO: 1977. In one aspect, the present disclosure provides an antibody or antigen-binding fragment thereof comprising a CDR-H3 comprising the amino acid sequence of SEQ ID NO: 1706, and a CDR-L3 comprising the amino acid sequence of SEQ ID NO: 1977.

[1474] In one aspect, the present disclosure provides an antibody or antigen-binding fragment thereof comprising at least one, at least two, or all three VH CDR sequences selected from: a. CDR-H1 comprising the amino acid sequence of SEQ ID NO: 622, b. CDR-H2 comprising the amino acid sequence of SEQ ID NO: 1164, c. CDR-H3 comprising the amino acid sequence of SEQ ID NO: 1706, and a VL comprising the amino acid sequence of SEQ ID NO: 351.

[1475] In one aspect, the present disclosure provides an antibody or antigen-binding fragment thereof comprising at least one, at least two, or all three VL CDR sequences selected from: a. CDR-L1 comprising the amino acid sequence of SEQ ID NO: 893, b. CDR-L2 comprising the amino acid sequence of SEQ ID NO: 1435, c. CDR-L3 comprising the amino acid sequence of SEQ ID NO: 1977, and a VH comprising the amino acid sequence of SEQ ID NO: 80.

[1476] In one aspect, an antibody or antigen-binding fragment thereof is provided, wherein the antibody or antigen-binding fragment thereof comprises a heavy chain variable domain (VH) having at least 90%, 91%, 92%, 93%, 94%, 95%, 96%, 97%, 98%, 99%, or 100% sequence identity to the amino acid sequence SEQ ID NO: 80. In some embodiments, a VH sequence having at least 90%, 91%, 92%, 93%, 94%, 95%, 96%, 97%, 98%, or 99% identity contains substitutions (e.g., conservative substitutions), insertions, or deletions relative to the reference sequence, but an antibody or antigen-binding fragment thereof comprising that sequence retains the ability to bind to same antigen as of the parent (e.g., cancer associated antigen). In some embodiments, a total of 1 to 10 amino acids have been substituted, inserted and/or deleted in the amino acid sequence SEQ ID NO: 80. In some embodiments, substitutions, insertions, or deletions occur in regions outside the CDRs (e.g., in the FRs). Optionally, the antibody or antigen-binding fragment thereof comprises the VH sequence SEQ ID NO: 80, including one or more post-translational modifications of that sequence. In a particular embodiment, the VH comprises one, two or three CDRs selected from: a CDR-H1, comprising the amino acid sequence SEQ ID NO: 622, b. CDR-H2, comprising the amino acid sequence SEQ ID NO: 1164, and c. CDR-H3, comprising the amino acid sequence SEQ ID NO: 1706.

[1477] In one aspect, an antibody or antigen-binding fragment thereof is provided, wherein the antibody or antigen-binding fragment thereof comprises a light chain variable domain (VL) having at least 90%, 91%, 92%, 93%, 94%, 95%, 96%, 97%, 98%, 99%, or 100% sequence identity to the amino acid sequence SEQ ID NO: 351. In some embodiments, a VL sequence having at least 90%, 91%, 92%, 93%, 94%, 95%, 96%, 97%, 98%, or 99% identity contains substitutions (e.g., conservative substitutions), insertions, or deletions relative to the reference sequence, but an antibody or antigen-binding fragment thereof comprising that sequence retains the ability to bind to same antigen as the parent (e.g., cancer associated antigen). In some embodiments, a total of 1 to 10 amino acids have been substituted, inserted and/or deleted in the amino acid sequence SEQ ID NO: 351. In some embodiments, the substitutions, insertions, or deletions occur in regions outside the CDRs (e.g., in the FRs). Optionally, the antibody or antigen-binding fragment thereof comprises the VL sequence SEQ ID NO: 351, including one or more post-translational modifications of that sequence. In a particular embodiment, the VL comprises one, two or three CDRs selected from: a. CDR-L1, comprising the amino acid sequence SEQ ID NO: 893, b. CDR-L2, comprising the amino acid sequence SEQ ID NO: 1435, and c. CDR-L3, comprising the amino acid sequence SEQ ID NO: 1977.

[1478] In one aspect, an antibody or antigen-binding fragment thereof is provided, wherein the antibody or antigen-binding fragment thereof comprises a VH as in any of the embodiments provided above, and a VL as in any of the embodiments provided above. In some embodiments, the antibody or antigen-binding fragment thereof comprises the VH amino acid sequence of SEQ ID NO: 80, and the VL amino acid sequence of SEQ ID NO: 351, optionally including post-translational modifications of those sequences.

### TCOL1002

[1479] In one aspect, the present disclosure provides an antibody or antigen-binding fragment thereof comprising at least one or both variable regions selected from: a. VH comprising the amino acid sequence of SEQ ID NO: 81 and b. VL comprising the amino acid sequence of SEQ ID NO: 352.

[1480] In one aspect, the present disclosure provides an antibody or antigen-binding fragment thereof comprising at least one, two, three, four, five, or six CDRs selected from: a. CDR-H1 comprising the amino acid sequence of SEQ ID NO: 623, b. CDR-H2 comprising the amino acid sequence of SEQ ID NO: 1165, c. CDR-H3 comprising the amino acid sequence of SEQ ID NO: 1707, d. CDR-L1 comprising the amino acid sequence of SEQ ID NO: 894, e. CDR-L2 comprising the amino acid sequence of SEQ ID NO: 1436, and f. CDR-L3 comprising the amino acid sequence of SEQ ID NO: 1978.

[1481] In one aspect, the present disclosure provides an antibody or antigen-binding fragment thereof comprising a CDR-H3 comprising the amino acid sequence of SEQ ID NO: 1707, and a CDR-L3 comprising the amino acid sequence of SEQ ID NO: 1978.

[1482] In one aspect, the present disclosure provides an antibody or antigen-binding fragment thereof comprising at least one, at least two, or all three VH CDR sequences selected from: a. CDR-H1 comprising the amino acid sequence of SEQ ID NO: 623, b. CDR-H2 comprising the amino acid sequence of SEQ ID NO: 1165, c. CDR-H3 comprising the amino acid sequence of SEQ ID NO: 1707, and a VL comprising the amino acid sequence of SEQ ID NO: 352.

[1483] In one aspect, the present disclosure provides an antibody or antigen-binding fragment thereof comprising at least one, at least two, or all three VL CDR sequences selected from: a. CDR-L1 comprising the amino acid sequence of SEQ ID NO: 894, b. CDR-L2 comprising the amino acid sequence of SEQ ID NO: 1436, c. CDR-L3 comprising the amino acid sequence of SEQ ID NO: 1978, and a VH comprising the amino acid sequence of SEQ ID NO: 81.

[1484] In one aspect, an antibody or antigen-binding fragment thereof is provided, wherein the antibody or antigen-binding fragment thereof comprises a heavy chain variable domain (VH) having at least 90%, 91%, 92%, 93%, 94%, 95%, 96%, 97%, 98%, 99%, or 100% sequence identity to the amino acid sequence SEQ ID NO: 81. In some embodiments, a VH sequence having at least 90%, 91%, 92%, 93%, 94%, 95%, 96%, 97%, 98%, or 99% identity contains substitutions (e.g., conservative substitutions), insertions, or deletions relative to the reference sequence, but an antibody or antigen-binding fragment thereof comprising that sequence retains the ability to bind to same antigen as of the parent (e.g., cancer associated antigen). In some embodiments, a total of 1 to 10 amino acids have been substituted, inserted and/or deleted in the amino acid sequence SEQ ID NO: 81. In some embodiments, substitutions, insertions, or deletions occur in regions outside the CDRs (e.g., in the FRs). Optionally, the antibody or antigen-binding fragment thereof comprises the VH sequence SEQ ID NO: 81, including one or more post-translational modifications of that sequence. In a particular embodiment, the VH comprises one, two or three CDRs selected from: a. CDR-H1, comprising the amino acid sequence SEQ ID NO: 623, b. CDR-H2, comprising the amino acid sequence SEQ ID NO: 1165, and c. CDR-H3, comprising the amino acid sequence SEQ ID NO: 1707.

[1485] In one aspect, an antibody or antigen-binding fragment thereof is provided, wherein the antibody or antigen-binding fragment thereof comprises a light chain variable domain (VL) having at least 90%, 91%, 92%, 93%, 94%, 95%, 96%, 97%, 98%, 99%, or 100% sequence identity to the amino acid sequence SEQ ID NO: 352. In some embodiments, a VL sequence having at least 90%, 91%, 92%, 93%, 94%, 95%, 96%, 97%, 98%, or 99% identity contains substitutions (e.g., conservative substitutions), insertions, or deletions relative to the reference sequence, but an antibody or antigen-binding fragment thereof comprising that sequence retains the ability to bind to same antigen as the parent (e.g., cancer associated antigen). In some embodiments, a total of 1 to 10 amino acids have been substituted, inserted and/or deleted in the amino acid sequence SEQ ID NO: 352. In some embodiments, the substitutions, insertions, or deletions occur in regions outside the CDRs (e.g., in the FRs). Optionally, the antibody or antigen-binding fragment thereof comprises the VL sequence SEQ ID NO: 352, including one or more post-translational modifications of that sequence. In a particular embodiment, the VL comprises one, two or three CDRs selected from: a. CDR-L1, comprising the amino acid sequence SEQ ID NO: 894, b. CDR-L2, comprising the amino acid sequence SEQ ID NO: 1436, and c. CDR-L3, comprising the amino acid sequence SEQ ID NO: 1978.

[1486] In one aspect, an antibody or antigen-binding fragment thereof is provided, wherein the antibody or antigen-binding fragment thereof comprises a VH as in any of the embodiments provided above, and a VL as in any of the embodiments provided above. In some embodiments, the antibody or antigen-binding fragment thereof comprises the VH amino acid sequence of SEQ ID NO: 81, and the VL amino acid sequence of SEQ ID NO: 352, optionally including post-translational modifications of those sequences.

### TCOL1003

[1487] In one aspect, the present disclosure provides an antibody or antigen-binding fragment thereof comprising at least one or both variable regions selected from: a. VH comprising the amino acid sequence of SEQ ID NO: 82 and b. VL comprising the amino acid sequence of SEQ ID NO: 353.

[1488] In one aspect, the present disclosure provides an antibody or antigen-binding fragment thereof comprising at least one, two, three, four, five, or six CDRs selected from: a. CDR-H1 comprising the amino acid sequence of SEQ ID NO: 624, b. CDR-H2 comprising the amino acid sequence of SEQ ID NO: 1166, c. CDR-H3 comprising the amino acid sequence of SEQ ID NO: 1708, d. CDR-L1 comprising the amino acid sequence of SEQ ID NO: 895, e. CDR-L2 comprising the amino acid sequence of SEQ ID NO: 1437, and f. CDR-L3 comprising the amino acid sequence of SEQ ID NO: 1979. In one aspect, the present disclosure provides an antibody or antigen-binding fragment thereof comprising a CDR-H3 comprising the amino acid sequence of SEQ ID NO: 1708, and a CDR-L3 comprising the amino acid sequence of SEQ ID NO: 1979.

[1489] In one aspect, the present disclosure provides an antibody or antigen-binding fragment thereof comprising at least one, at least two, or all three VH CDR sequences selected from: a. CDR-H1 comprising the amino acid sequence of SEQ ID NO: 624, b. CDR-H2 comprising the amino acid sequence of SEQ ID NO: 1166, c. CDR-H3 comprising the amino acid sequence of SEQ ID NO: 1708, and a VL comprising the amino acid sequence of SEQ ID NO: 353.

[1490] In one aspect, the present disclosure provides an antibody or antigen-binding fragment thereof comprising at least one, at least two, or all three VL CDR sequences selected from: a. CDR-L1 comprising the amino acid sequence of SEQ ID NO: 895, b. CDR-L2 comprising the amino acid sequence of SEQ ID NO: 1437, c. CDR-L3 comprising the amino acid sequence of SEQ ID NO: 1979, and a VH comprising the amino acid sequence of SEQ ID NO: 82.

[1491] In one aspect, an antibody or antigen-binding fragment thereof is provided, wherein the antibody or antigen-binding fragment thereof comprises a heavy chain variable domain (VH) having at least 90%, 91%, 92%, 93%, 94%, 95%, 96%, 97%, 98%, 99%, or 100% sequence identity to the amino acid sequence SEQ ID NO: 82. In some embodiments, a VH sequence having at least 90%, 91%, 92%, 93%, 94%, 95%, 96%, 97%, 98%, or 99% identity contains substitutions (e.g., conservative substitutions), insertions, or deletions relative to the reference sequence, but an antibody or antigen-binding fragment thereof comprising that sequence retains the ability to bind to same antigen as of the parent (e.g., cancer associated antigen). In some embodiments, a total of 1 to 10 amino acids have been substituted, inserted and/or deleted in the amino acid sequence SEQ ID NO: 82. In some embodiments, substitutions, insertions, or deletions occur in regions outside the CDRs (e.g., in the FRs). Optionally, the antibody or antigen-binding fragment thereof comprises the VH sequence SEQ ID NO: 82, including one or more post-translational modifications of that sequence. In a particular embodiment, the VH comprises one, two or three CDRs selected from: a. CDR-H1, comprising the amino acid sequence SEQ ID NO: 624, b. CDR-H2, comprising the amino acid sequence SEQ ID NO: 1166, and c. CDR-H3, comprising the amino acid sequence SEQ ID NO: 1708.

[1492] In one aspect, an antibody or antigen-binding fragment thereof is provided, wherein the antibody or antigen-binding fragment thereof comprises a light chain variable domain (VL) having at least 90%, 91%, 92%, 93%, 94%, 95%, 96%, 97%, 98%, 99%, or 100% sequence identity to the amino acid sequence SEQ ID NO: 353. In some embodiments, a VL sequence having at least 90%, 91%, 92%, 93%, 94%, 95%, 96%, 97%, 98%, or 99% identity contains substitutions (e.g., conservative substitutions), insertions, or deletions relative to the reference sequence, but an antibody or antigen-binding fragment thereof comprising that sequence retains the ability to bind to same antigen as the parent (e.g., cancer associated antigen). In some embodiments, a total of 1 to 10 amino acids have been substituted, inserted and/or deleted in the amino acid sequence SEQ ID NO: 353. In some embodiments, the substitutions, insertions, or deletions occur in regions outside the CDRs (e.g., in the FRs). Optionally, the antibody or antigen-binding fragment thereof comprises the VL sequence SEQ ID NO: 353, including one or more post-translational modifications of that sequence. In a particular embodiment, the VL comprises one, two or three CDRs selected from: a. CDR-L1, comprising the amino acid sequence SEQ ID NO: 895, b. CDR-L2, comprising the amino acid sequence SEQ ID NO: 1437, and c. CDR-L3, comprising the amino acid sequence SEQ ID NO: 1979.

[1493] In one aspect, an antibody or antigen-binding fragment thereof is provided, wherein the antibody or antigen-binding fragment thereof comprises a VH as in any of the embodiments provided above, and a VL as in any of the embodiments provided above. In some embodiments, the antibody or antigen-binding fragment thereof comprises the VH amino acid sequence of SEQ ID NO: 82, and the VL amino acid sequence of SEQ ID NO: 353, optionally including post-translational modifications of those sequences.

### TCOL1004

[1494] In one aspect, the present disclosure provides an antibody or antigen-binding fragment thereof comprising at least one or both variable regions selected from: a. VH comprising the amino acid sequence of SEQ ID NO: 83 and b. VL comprising the amino acid sequence of SEQ ID NO: 354.

[1495] In one aspect, the present disclosure provides an antibody or antigen-binding fragment thereof comprising at least one, two, three, four, five, or six CDRs selected from: a. CDR-H1 comprising the amino acid sequence of SEQ ID NO: 625, b. CDR-H2 comprising the amino acid sequence of SEQ ID NO: 1167, c. CDR-H3 comprising the amino acid sequence of SEQ ID NO: 1709, d. CDR-L1 comprising the amino acid sequence of SEQ ID NO: 896, e. CDR-L2 comprising the amino acid sequence of SEQ ID NO: 1438, and f. CDR-L3 comprising the amino acid sequence of SEQ ID NO: 1980. In one aspect, the present disclosure provides an antibody or antigen-binding fragment thereof comprising a CDR-H3 comprising the amino acid sequence of SEQ ID NO: 1709, and a CDR-L3 comprising the amino acid sequence of SEQ ID NO: 1980.

[1496] In one aspect, the present disclosure provides an antibody or antigen-binding fragment thereof comprising at least one, at least two, or all three VH CDR sequences selected from: a. CDR-H1 comprising the amino acid sequence of SEQ ID NO: 625, b. CDR-H2 comprising the amino acid sequence of SEQ ID NO: 1167, c. CDR-H3 comprising the amino acid sequence of SEQ ID NO: 1709, and a VL comprising the amino acid sequence of SEQ ID NO: 354.

[1497] In one aspect, the present disclosure provides an antibody or antigen-binding fragment thereof comprising at least one, at least two, or all three VL CDR sequences selected from: a. CDR-L1 comprising the amino acid sequence of SEQ ID NO: 896, b. CDR-L2 comprising the amino acid sequence of SEQ ID NO: 1438, c. CDR-L3 comprising the amino acid sequence of SEQ ID NO: 1980, and a VH comprising the amino acid sequence of SEQ ID NO: 83.

[1498] In one aspect, an antibody or antigen-binding fragment thereof is provided, wherein the antibody or antigen-binding fragment thereof comprises a heavy chain variable domain (VH) having at least 90%, 91%, 92%, 93%, 94%, 95%, 96%, 97%, 98%, 99%, or 100% sequence identity to the amino acid sequence SEQ ID NO: 83. In some embodiments, a VH sequence having at least 90%, 91%, 92%, 93%, 94%, 95%, 96%, 97%, 98%, or 99% identity contains substitutions (e.g., conservative substitutions), thereof comprising that sequence retains the ability to bind to same antigen as of the parent (e.g., cancer associated antigen). In some embodiments, a total of 1 to 10 amino acids have been substituted, inserted and/or deleted in the amino acid sequence SEQ ID NO: 83. In some embodiments, substitutions, insertions, or deletions occur in regions outside the CDRs (e.g., in the FRs). Optionally, the antibody or antigen-binding fragment thereof comprises the VH sequence SEQ ID NO: 83, including one or more post-translational modifications of that sequence. In a particular embodiment, the VH comprises one, two or three CDRs selected from: a. CDR-H1, comprising the amino acid sequence SEQ ID NO: 625, b. CDR-H2, comprising the amino acid sequence SEQ ID NO: 1167, and c. CDR-H3, comprising the amino acid sequence SEQ ID NO: 1709.

[1499] In one aspect, an antibody or antigen-binding fragment thereof is provided, wherein the antibody or antigen-binding fragment thereof comprises a light chain variable domain (VL) having at least 90%, 91%, 92%, 93%, 94%, 95%, 96%, 97%, 98%, 99%, or 100% sequence identity to the amino acid sequence SEQ ID NO: 354. In some embodiments, a VL sequence having at least 90%, 91%, 92%, 93%, 94%, 95%, 96%, 97%, 98%, or 99% identity contains substitutions (e.g., conservative substitutions), insertions, or deletions relative to the reference sequence, but an antibody or antigen-binding fragment thereof comprising that sequence retains the ability to bind to same antigen as the parent (e.g., cancer associated antigen). In some embodiments, a total of 1 to 10 amino acids have been substituted, inserted and/or deleted in the amino acid sequence SEQ ID NO: 354. In some embodiments, the substitutions, insertions, or deletions occur in regions outside the CDRs (e.g., in the FRs). Optionally, the antibody or antigen-binding fragment thereof comprises the VL sequence SEQ ID NO: 354, including one or more post-translational modifications of that sequence. In a particular embodiment, the VL comprises one, two or three CDRs selected from: a. CDR-L1, comprising the amino acid sequence SEQ ID NO: 896, b. CDR-L2, comprising the amino acid sequence SEQ ID NO: 1438, and c. CDR-L3, comprising the amino acid sequence SEQ ID NO: 1980.

[1500] In one aspect, an antibody or antigen-binding fragment thereof is provided, wherein the antibody or antigen-binding fragment thereof comprises a VH as in any of the embodiments provided above, and a VL as in any of the embodiments provided above. In some embodiments, the antibody or antigen-binding fragment thereof comprises the VH amino acid sequence of SEQ ID NO: 83, and the VL amino acid sequence of SEQ ID NO: 354, optionally including post-translational modifications of those sequences.

### TCOL1005

[1501] In one aspect, the present disclosure provides an antibody or antigen-binding fragment thereof comprising at least one or both variable regions selected from: a. VH comprising the amino acid sequence of SEQ ID NO: 84 and b. VL comprising the amino acid sequence of SEQ ID NO: 355.

[1502] In one aspect, the present disclosure provides an antibody or antigen-binding fragment thereof comprising at least one, two, three, four, five, or six CDRs selected from: a. CDR-H1 comprising the amino acid sequence of SEQ ID NO: 626, b. CDR-H2 comprising the amino acid sequence of SEQ ID NO: 1168, c. CDR-H3 comprising the amino acid sequence of SEQ ID NO: 1710, d. CDR-L1 comprising the amino acid sequence of SEQ ID NO: 897, e. CDR-L2 comprising the amino acid sequence of SEQ ID NO: 1439, and f. CDR-L3 comprising the amino acid sequence of SEQ ID NO: 1981. In one aspect, the present disclosure provides an antibody or antigen-binding fragment thereof comprising a CDR-H3 comprising the amino acid sequence of SEQ ID NO: 1710, and a CDR-L3 comprising the amino acid sequence of SEQ ID NO: 1981.

[1503] In one aspect, the present disclosure provides an antibody or antigen-binding fragment thereof comprising at least one, at least two, or all three VH CDR sequences selected from: a. CDR-H1 comprising the amino acid sequence of SEQ ID NO: 626, b. CDR-H2 comprising the amino acid sequence of SEQ ID NO: 1168, c. CDR-H3 comprising the amino acid sequence of SEQ ID NO: 1710, and a VL comprising the amino acid sequence of SEQ ID NO: 355.

[1504] In one aspect, the present disclosure provides an antibody or antigen-binding fragment thereof comprising at least one, at least two, or all three VL CDR sequences selected from: a. CDR-L1 comprising the amino acid sequence of SEQ ID NO: 897, b. CDR-L2 comprising the amino acid sequence of SEQ ID NO: 1439, c. CDR-L3 comprising the amino acid sequence of SEQ ID NO: 1981, and a VH comprising the amino acid sequence of SEQ ID NO: 84.

[1505] In one aspect, an antibody or antigen-binding fragment thereof is provided, wherein the antibody or antigen-binding fragment thereof comprises a heavy chain variable domain (VH) having at least 90%, 91%, 92%, 93%, 94%, 95%, 96%, 97%, 98%, 99%, or 100% sequence identity to the amino acid sequence SEQ ID NO: 84. In some embodiments, a VH sequence having at least 90%, 91%, 92%, 93%, 94%, 95%, 96%, 97%, 98%, or 99% identity contains substitutions (e.g., conservative substitutions), insertions, or deletions relative to the reference sequence, but an antibody or antigen-binding fragment thereof comprising that sequence retains the ability to bind to same antigen as of the parent (e.g., cancer associated antigen). In some embodiments, a total of 1 to 10 amino acids have been substituted, inserted and/or deleted in the amino acid sequence SEQ ID NO: 84. In some embodiments, substitutions, insertions, or deletions occur in regions outside the CDRs (e.g., in the FRs). Optionally, the antibody or antigen-binding fragment thereof comprises the VH sequence SEQ ID NO: 84, including one or more post-translational modifications of that sequence. In a particular embodiment, the VH comprises one, two or three CDRs selected from: a. CDR-H1, comprising the amino acid sequence SEQ ID NO: 626, b. CDR-H2, comprising the amino acid sequence SEQ ID NO: 1168, and c. CDR-H3, comprising the amino acid sequence SEQ ID NO: 1710.

[1506] In one aspect, an antibody or antigen-binding fragment thereof is provided, wherein the antibody or antigen-binding fragment thereof comprises a light chain variable domain (VL) having at least 90%, 91%, 92%, 93%, 94%, 95%, 96%, 97%, 98%, 99%, or 100% sequence identity to the amino acid sequence SEQ ID NO: 355. In some embodiments, a VL sequence having at least 90%, 91%, 92%, 93%, 94%, 95%, 96%, 97%, 98%, or 99% identity contains substitutions (e.g., conservative substitutions), insertions, or deletions relative to the reference sequence, but an antibody or antigen-binding fragment thereof comprising that sequence retains the ability to bind to same antigen as the parent (e.g., cancer associated antigen). In some embodiments, a total of 1 to 10 amino acids have been substituted, inserted and/or deleted in the amino acid sequence SEQ ID NO: 355. In some embodiments, the substitutions, insertions, or deletions occur in regions outside the CDRs (e.g., in the FRs). Optionally, the antibody or antigen-binding fragment thereof comprises the VL sequence SEQ ID NO: 355, including one or more post-translational modifications of that sequence. In a particular embodiment, the VL comprises one, two or three CDRs selected from: a. CDR-L1, comprising the amino acid sequence SEQ ID NO: 897, b. CDR-L2, comprising the amino acid sequence SEQ ID NO: 1439, and c. CDR-L3, comprising the amino acid sequence SEQ ID NO: 1981.

[1507] In one aspect, an antibody or antigen-binding fragment thereof is provided, wherein the antibody or antigen-binding fragment thereof comprises a VH as in any of the embodiments provided above, and a VL as in any of the embodiments provided above. In some embodiments, the antibody or antigen-binding fragment thereof comprises the VH amino acid sequence of SEQ ID NO: 84, and the VL amino acid sequence of SEQ ID NO: 355, optionally including post-translational modifications of those sequences.

### TCOL1006

[1508] In one aspect, the present disclosure provides an antibody or antigen-binding fragment thereof comprising at least one or both variable regions selected from: a. VH comprising the amino acid sequence of SEQ ID NO: 85 and b. VL comprising the amino acid sequence of SEQ ID NO: 356.

[1509] In one aspect, the present disclosure provides an antibody or antigen-binding fragment thereof comprising at least one, two, three, four, five, or six CDRs selected from: a. CDR-H1 comprising the amino acid sequence of SEQ ID NO: 627, b. CDR-H2 comprising the amino acid sequence of SEQ ID NO: 1169, c. CDR-H3 comprising the amino acid sequence of SEQ ID NO: 1711, d. CDR-L1 comprising the amino acid sequence of SEQ ID NO: 898, e. CDR-L2 comprising the amino acid sequence of SEQ ID NO: 1440, and f. CDR-L3 comprising the amino acid sequence of SEQ ID NO: 1982.

[1510] In one aspect, the present disclosure provides an antibody or antigen-binding fragment thereof comprising a CDR-H3 comprising the amino acid sequence of SEQ ID NO: 1711, and a CDR-L3 comprising the amino acid sequence of SEQ ID NO: 1982.

[1511] In one aspect, the present disclosure provides an antibody or antigen-binding fragment thereof comprising at least one, at least two, or all three VH CDR sequences selected from: a. CDR-H1 comprising the amino acid sequence of SEQ ID NO: 627, b. CDR-H2 comprising the amino acid sequence of SEQ ID NO: 1169, c. CDR-H3 comprising the amino acid sequence of SEQ ID NO: 1711, and a VL comprising the amino acid sequence of SEQ ID NO: 356.

[1512] In one aspect, the present disclosure provides an antibody or antigen-binding fragment thereof comprising at least one, at least two, or all three VL CDR sequences selected from: a. CDR-L1 comprising the amino acid sequence of SEQ ID NO: 898, b. CDR-L2 comprising the amino acid sequence of SEQ ID NO: 1440, c. CDR-L3 comprising the amino acid sequence of SEQ ID NO: 1982, and a VH comprising the amino acid sequence of SEQ ID NO: 85.

[1513] In one aspect, an antibody or antigen-binding fragment thereof is provided, wherein the antibody or antigen-binding fragment thereof comprises a heavy chain variable domain (VH) having at least 90%, 91%, 92%, 93%, 94%, 95%, 96%, 97%, 98%, 99%, or 100% sequence identity to the amino acid sequence SEQ ID NO: 85. In some embodiments, a VH sequence having at least 90%, 91%, 92%, 93%, 94%, 95%, 96%, 97%, 98%, or 99% identity contains substitutions (e.g., conservative substitutions), insertions, or deletions relative to the reference sequence, but an antibody or antigen-binding fragment thereof comprising that sequence retains the ability to bind to same antigen as of the parent (e.g., cancer associated antigen). In some embodiments, a total of 1 to 10 amino acids have been substituted, inserted and/or deleted in the amino acid sequence SEQ ID NO: 85. In some embodiments, substitutions, insertions, or deletions occur in regions outside the CDRs (e.g., in the FRs). Optionally, the antibody or antigen-binding fragment thereof comprises the VH sequence SEQ ID NO: 85, including one or more post-translational modifications of that sequence. In a particular embodiment, the VH comprises one, two or three CDRs selected from: a. CDR-H1, comprising the amino acid sequence SEQ ID NO: 627, b. CDR-H2, comprising the amino acid sequence SEQ ID NO: 1169, and c. CDR-H3, comprising the amino acid sequence SEQ ID NO: 1711.

[1514] In one aspect, an antibody or antigen-binding fragment thereof is provided, wherein the antibody or antigen-binding fragment thereof comprises a light chain variable domain (VL) having at least 90%, 91%, 92%, 93%, 94%, 95%, 96%, 97%, 98%, 99%, or 100% sequence identity to the amino acid sequence SEQ ID NO: 356. In some embodiments, a VL sequence having at least 90%, 91%, 92%, 93%, 94%, 95%, 96%, 97%, 98%, or 99% identity contains substitutions (e.g., conservative substitutions), insertions, or deletions relative to the reference sequence, but an antibody or antigen-binding fragment thereof comprising that sequence retains the ability to bind to same antigen as the parent (e.g., cancer associated antigen). In some embodiments, a total of 1 to 10 amino acids have been substituted, inserted and/or deleted in the amino acid sequence SEQ ID NO: 356. In some embodiments, the substitutions, insertions, or deletions occur in regions outside the CDRs (e.g., in the FRs). Optionally, the antibody or antigen-binding fragment thereof comprises the VL sequence SEQ ID NO: 356, including one or more post-translational modifications of that sequence. In a particular embodiment, the VL comprises one, two or three CDRs selected from: a. CDR-L1, comprising the amino acid sequence SEQ ID NO: 898, b. CDR-L2, comprising the amino acid sequence SEQ ID NO: 1440, and c. CDR-L3, comprising the amino acid sequence SEQ ID NO: 1982.

[1515] In one aspect, an antibody or antigen-binding fragment thereof is provided, wherein the antibody or antigen-binding fragment thereof comprises a VH as in any of the embodiments provided above, and a VL as in any of the embodiments provided above. In some embodiments, the antibody or antigen-binding fragment thereof comprises the VH amino acid sequence of SEQ ID NO: 85, and the VL amino acid sequence of SEQ ID NO: 356, optionally including post-translational modifications of those sequences.

### TCOL1007

[1516] In one aspect, the present disclosure provides an antibody or antigen-binding fragment thereof comprising at least one or both variable regions selected from: a. VH comprising the amino acid sequence of SEQ ID NO: 86 and b. VL comprising the amino acid sequence of SEQ ID NO: 357.

[1517] In one aspect, the present disclosure provides an antibody or antigen-binding fragment thereof comprising at least one, two, three, four, five, or six CDRs selected from: a. CDR-H1 comprising the amino acid sequence of SEQ ID NO: 628, b. CDR-H2 comprising the amino acid sequence of SEQ ID NO: 1170, c. CDR-H3 comprising the amino acid sequence of SEQ ID NO: 1712, d. CDR-L1 comprising the amino acid sequence of SEQ ID NO: 899, e. CDR-L2 comprising the amino acid sequence of SEQ ID NO: 1441, and f. CDR-L3 comprising the amino acid sequence of SEQ ID NO: 1983.

[1518] In one aspect, the present disclosure provides an antibody or antigen-binding fragment thereof comprising a CDR-H3 comprising the amino acid sequence of SEQ ID NO: 1712, and a CDR-L3 comprising the amino acid sequence of SEQ ID NO: 1983.

[1519] In one aspect, the present disclosure provides an antibody or antigen-binding fragment thereof comprising at least one, at least two, or all three VH CDR sequences selected from: a. CDR-H1 comprising the amino acid sequence of SEQ ID NO: 628, b. CDR-H2 comprising the amino acid sequence of SEQ ID NO: 1170, c. CDR-H3 comprising the amino acid sequence of SEQ ID NO: 1712, and a VL comprising the amino acid sequence of SEQ ID NO: 357.

[1520] In one aspect, the present disclosure provides an antibody or antigen-binding fragment thereof comprising at least one, at least two, or all three VL CDR sequences selected from: a. CDR-L1 comprising the amino acid sequence of SEQ ID NO: 899, b. CDR-L2 comprising the amino acid sequence of SEQ ID NO: 1441, c. CDR-L3 comprising the amino acid sequence of SEQ ID NO: 1983, and a VH comprising the amino acid sequence of SEQ ID NO: 86.

[1521] In one aspect, an antibody or antigen-binding fragment thereof is provided, wherein the antibody or antigen-binding fragment thereof comprises a heavy chain variable domain (VH) having at least 90%, 91%, 92%, 93%, 94%, 95%, 96%, 97%, 98%, 99%, or 100% sequence identity to the amino acid sequence SEQ ID NO: 86. In some embodiments, a VH sequence having at least 90%, 91%, 92%, 93%, 94%, 95%, 96%, 97%, 98%, or 99% identity contains substitutions (e.g., conservative substitutions), insertions, or deletions relative to the reference sequence, but an antibody or antigen-binding fragment thereof comprising that sequence retains the ability to bind to same antigen as of the parent (e.g., cancer associated antigen). In some embodiments, a total of 1 to 10 amino acids have been substituted, inserted and/or deleted in the amino acid sequence SEQ ID NO: 86. In some embodiments, substitutions, insertions, or deletions occur in regions outside the CDRs (e.g., in the FRs). Optionally, the antibody or antigen-binding fragment thereof comprises the VH sequence SEQ ID NO: 86, including one or more post-translational modifications of that sequence. In a particular embodiment, the VH comprises one, two or three CDRs selected from: a. CDR-H1, comprising the amino acid sequence SEQ ID NO: 628, b. CDR-H2, comprising the amino acid sequence SEQ ID NO: 1170, and c. CDR-H3, comprising the amino acid sequence SEQ ID NO: 1712.

[1522] In one aspect, an antibody or antigen-binding fragment thereof is provided, wherein the antibody or antigen-binding fragment thereof comprises a light chain variable domain (VL) having at least 90%, 91%, 92%, 93%, 94%, 95%, 96%, 97%, 98%, 99%, or 100% sequence identity to the amino acid sequence SEQ ID NO: 357. In some embodiments, a VL sequence having at least 90%, 91%, 92%, 93%, 94%, 95%, 96%, 97%, 98%, or 99% identity contains substitutions (e.g., conservative substitutions), insertions, or deletions relative to the reference sequence, but an antibody or antigen-binding fragment thereof comprising that sequence retains the ability to bind to same antigen as the parent (e.g., cancer associated antigen). In some embodiments, a total of 1 to 10 amino acids have been substituted, inserted and/or deleted in the amino acid sequence SEQ ID NO: 357. In some embodiments, the substitutions, insertions, or deletions occur in regions outside the CDRs (e.g., in the FRs). Optionally, the antibody or antigen-binding fragment thereof comprises the VL sequence SEQ ID NO: 357, including one or more post-translational modifications of that sequence. In a particular embodiment, the VL comprises one, two or three CDRs selected from: a. CDR-L1, comprising the amino acid sequence SEQ ID NO: 899, b. CDR-L2, comprising the amino acid sequence SEQ ID NO: 1441, and c. CDR-L3, comprising the amino acid sequence SEQ ID NO: 1983.

[1523] In one aspect, an antibody or antigen-binding fragment thereof is provided, wherein the antibody or antigen-binding fragment thereof comprises a VH as in any of the embodiments provided above, and a VL as in any of the embodiments provided above. In some embodiments, the antibody or antigen-binding fragment thereof comprises the VH amino acid sequence of SEQ ID NO: 86, and the VL amino acid sequence of SEQ ID NO: 357, optionally including post-translational modifications of those sequences.

### TCOL1008

[1524] In one aspect, the present disclosure provides an antibody or antigen-binding fragment thereof comprising at least one or both variable regions selected from: a. VH comprising the amino acid sequence of SEQ ID NO: 87 and b. VL comprising the amino acid sequence of SEQ ID NO: 358.

[1525] In one aspect, the present disclosure provides an antibody or antigen-binding fragment thereof comprising at least one, two, three, four, five, or six CDRs selected from: a. CDR-H1 comprising the amino acid sequence of SEQ ID NO: 629, b. CDR-H2 comprising the amino acid sequence of SEQ ID NO: 1171, c. CDR-H3 comprising the amino acid sequence of SEQ ID NO: 1713, d. CDR-L1 comprising the amino acid sequence of SEQ ID NO: 900, e. CDR-L2 comprising the amino acid sequence of SEQ ID NO: 1442, and f. CDR-L3 comprising the amino acid sequence of SEQ ID NO: 1984. In one aspect, the present disclosure provides an antibody or antigen-binding fragment thereof comprising a CDR-H3 comprising the amino acid sequence of SEQ ID NO: 1713, and a CDR-L3 comprising the amino acid sequence of SEQ ID NO: 1984.

[1526] In one aspect, the present disclosure provides an antibody or antigen-binding fragment thereof comprising at least one, at least two, or all three VH CDR sequences selected from: a. CDR-H1 comprising the amino acid sequence of SEQ ID NO: 629, b. CDR-H2 comprising the amino acid sequence of SEQ ID NO: 1171, c. CDR-H3 comprising the amino acid sequence of SEQ ID NO: 1713, and a VL comprising the amino acid sequence of SEQ ID NO: 358.

[1527] In one aspect, the present disclosure provides an antibody or antigen-binding fragment thereof comprising at least one, at least two, or all three VL CDR sequences selected from: a. CDR-L1 comprising the amino acid sequence of SEQ ID NO: 900, b. CDR-L2 comprising the amino acid sequence of SEQ ID NO: 1442, c. CDR-L3 comprising the amino acid sequence of SEQ ID NO: 1984, and a VH comprising the amino acid sequence of SEQ ID NO: 87.

[1528] In one aspect, an antibody or antigen-binding fragment thereof is provided, wherein the antibody or antigen-binding fragment thereof comprises a heavy chain variable domain (VH) having at least 90%, 91%, 92%, 93%, 94%, 95%, 96%, 97%, 98%, 99%, or 100% sequence identity to the amino acid sequence SEQ ID NO: 87. In some embodiments, a VH sequence having at least 90%, 91%, 92%, 93%, 94%, 95%, 96%, 97%, 98%, or 99% identity contains substitutions (e.g., conservative substitutions), insertions, or deletions relative to the reference sequence, but an antibody or antigen-binding fragment thereof comprising that sequence retains the ability to bind to same antigen as of the parent (e.g., cancer associated antigen). In some embodiments, a total of 1 to 10 amino acids have been substituted, inserted and/or deleted in the amino acid sequence SEQ ID NO: 87. In some embodiments, substitutions, insertions, or deletions occur in regions outside the CDRs (e.g., in the FRs). Optionally, the antibody or antigen-binding fragment thereof comprises the VH sequence SEQ ID NO: 87, including one or more post-translational modifications of that sequence. In a particular embodiment, the VH comprises one, two or three CDRs selected from: a. CDR-H1, comprising the amino acid sequence SEQ ID NO: 629, b. CDR-H2, comprising the amino acid sequence SEQ ID NO: 1171, and c. CDR-H3, comprising the amino acid sequence SEQ ID NO: 1713.

[1529] In one aspect, an antibody or antigen-binding fragment thereof is provided, wherein the antibody or antigen-binding fragment thereof comprises a light chain variable domain (VL) having at least 90%, 91%, 92%, 93%, 94%, 95%, 96%, 97%, 98%, 99%, or 100% sequence identity to the amino acid sequence SEQ ID NO: 358. In some embodiments, a VL sequence having at least 90%, 91%, 92%, 93%, 94%, 95%, 96%, 97%, 98%, or 99% identity contains substitutions (e.g., conservative substitutions), insertions, or deletions relative to the reference sequence, but an antibody or antigen-binding fragment thereof comprising that sequence retains the ability to bind to same antigen as the parent (e.g., cancer associated antigen). In some embodiments, a total of 1 to 10 amino acids have been substituted, inserted and/or deleted in the amino acid sequence SEQ ID NO: 358. In some embodiments, the substitutions, insertions, or deletions occur in regions outside the CDRs (e.g., in the FRs). Optionally, the antibody or antigen-binding fragment thereof comprises the VL sequence SEQ ID NO: 358, including one or more post-translational modifications of that sequence. In a particular embodiment, the VL comprises one, two or three CDRs selected from: a. CDR-L1, comprising the amino acid sequence SEQ ID NO: 900, b. CDR-L2, comprising the amino acid sequence SEQ ID NO: 1442, and c. CDR-L3, comprising the amino acid sequence SEQ ID NO: 1984.

[1530] In one aspect, an antibody or antigen-binding fragment thereof is provided, wherein the antibody or antigen-binding fragment thereof comprises a VH as in any of the embodiments provided above, and a VL as in any of the embodiments provided above. In some embodiments, the antibody or antigen-binding fragment thereof comprises the VH amino acid sequence of SEQ ID NO: 87, and the VL amino acid sequence of SEQ ID NO: 358, optionally including post-translational modifications of those sequences.

### TCOL1009

[1531] In one aspect, the present disclosure provides an antibody or antigen-binding fragment thereof comprising at least one or both variable regions selected from: a. VH comprising the amino acid sequence of SEQ ID NO: 88 and b. VL comprising the amino acid sequence of SEQ ID NO: 359.

[1532] In one aspect, the present disclosure provides an antibody or antigen-binding fragment thereof comprising at least one, two, three, four, five, or six CDRs selected from: a. CDR-H1 comprising the amino acid sequence of SEQ ID NO: 630, b. CDR-H2 comprising the amino acid sequence of SEQ ID NO: 1172, c. CDR-H3 comprising the amino acid sequence of SEQ ID NO: 1714, d. CDR-L1 comprising the amino acid sequence of SEQ ID NO: 901, e. CDR-L2 comprising the amino acid sequence of SEQ ID NO: 1443, and f. CDR-L3 comprising the amino acid sequence of SEQ ID NO: 1985.

[1533] In one aspect, the present disclosure provides an antibody or antigen-binding fragment thereof comprising a CDR-H3 comprising the amino acid sequence of SEQ ID NO: 1714, and a CDR-L3 comprising the amino acid sequence of SEQ ID NO: 1985.

[1534] In one aspect, the present disclosure provides an antibody or antigen-binding fragment thereof comprising at least one, at least two, or all three VH CDR sequences selected from: a. CDR-H1 comprising the amino acid sequence of SEQ ID NO: 630, b. CDR-H2 comprising the amino acid sequence of SEQ ID NO: 1172, c. CDR-H3 comprising the amino acid sequence of SEQ ID NO: 1714, and a VL comprising the amino acid sequence of SEQ ID NO: 359.

[1535] In one aspect, the present disclosure provides an antibody or antigen-binding fragment thereof comprising at least one, at least two, or all three VL CDR sequences selected from: a. CDR-L1 comprising the amino acid sequence of SEQ ID NO: 901, b. CDR-L2 comprising the amino acid sequence of SEQ ID NO: 1443, c. CDR-L3 comprising the amino acid sequence of SEQ ID NO: 1985, and a VH comprising the amino acid sequence of SEQ ID NO: 88.

[1536] In one aspect, an antibody or antigen-binding fragment thereof is provided, wherein the antibody or antigen-binding fragment thereof comprises a heavy chain variable domain (VH) having at least 90%, 91%, 92%, 93%, 94%, 95%, 96%, 97%, 98%, 99%, or 100% sequence identity to the amino acid sequence SEQ ID NO: 88. In some embodiments, a VH sequence having at least 90%, 91%, 92%, 93%, 94%, 95%, 96%, 97%, 98%, or 99% identity contains substitutions (e.g., conservative substitutions), insertions, or deletions relative to the reference sequence, but an antibody or antigen-binding fragment thereof comprising that sequence retains the ability to bind to same antigen as of the parent (e.g., cancer associated antigen). In some embodiments, a total of 1 to 10 amino acids have been substituted, inserted and/or deleted in the amino acid sequence SEQ ID NO: 88. In some embodiments, substitutions, insertions, or deletions occur in regions outside the CDRs (e.g., in the FRs). Optionally, the antibody or antigen-binding fragment thereof comprises the VH sequence SEQ ID NO: 88, including one or more post-translational modifications of that sequence. In a particular embodiment, the VH comprises one, two or three CDRs selected from: a. CDR-H1, comprising the amino acid sequence SEQ ID NO: 630, b. CDR-H2, comprising the amino acid sequence SEQ ID NO: 1172, and c. CDR-H3, comprising the amino acid sequence SEQ ID NO: 1714.

[1537] In one aspect, an antibody or antigen-binding fragment thereof is provided, wherein the antibody or antigen-binding fragment thereof comprises a light chain variable domain (VL) having at least 90%, 91%, 92%, 93%, 94%, 95%, 96%, 97%, 98%, 99%, or 100% sequence identity to the amino acid sequence SEQ ID NO: 359. In some embodiments, a VL sequence having at least 90%, 91%, 92%, 93%, 94%, 95%, 96%, 97%, 98%, or 99% identity contains substitutions (e.g., conservative substitutions), insertions, or deletions relative to the reference sequence, but an antibody or antigen-binding fragment thereof comprising that sequence retains the ability to bind to same antigen as the parent (e.g., cancer associated antigen). In some embodiments, a total of 1 to 10 amino acids have been substituted, inserted and/or deleted in the amino acid sequence SEQ ID NO: 359. In some embodiments, the substitutions, insertions, or deletions occur in regions outside the CDRs (e.g., in the FRs). Optionally, the antibody or antigen-binding fragment thereof comprises the VL sequence SEQ ID NO: 359, including one or more post-translational modifications of that sequence. In a particular embodiment, the VL comprises one, two or three CDRs selected from: a. CDR-L1, comprising the amino acid sequence SEQ ID NO: 901, b. CDR-L2, comprising the amino acid sequence SEQ ID NO: 1443, and c. CDR-L3, comprising the amino acid sequence SEQ ID NO: 1985.

[1538] In one aspect, an antibody or antigen-binding fragment thereof is provided, wherein the antibody or antigen-binding fragment thereof comprises a VH as in any of the embodiments provided above, and a VL as in any of the embodiments provided above. In some embodiments, the antibody or antigen-binding fragment thereof comprises the VH amino acid sequence of SEQ ID NO: 88, and the VL amino acid sequence of SEQ ID NO: 359, optionally including post-translational modifications of those sequences.

### TESO1001

[1539] In one aspect, the present disclosure provides an antibody or antigen-binding fragment thereof comprising at least one or both variable regions selected from: a. VH comprising the amino acid sequence of SEQ ID NO: 89 and b. VL comprising the amino acid sequence of SEQ ID NO: 360.

[1540] In one aspect, the present disclosure provides an antibody or antigen-binding fragment thereof comprising at least one, two, three, four, five, or six CDRs selected from: a. CDR-H1 comprising the amino acid sequence of SEQ ID NO: 631, b. CDR-H2 comprising the amino acid sequence of SEQ ID NO: 1173, c. CDR-H3 comprising the amino acid sequence of SEQ ID NO: 1715, d. CDR-L1 comprising the amino acid sequence of SEQ ID NO: 902, e. CDR-L2 comprising the amino acid sequence of SEQ ID NO: 1444, and f. CDR-L3 comprising the amino acid sequence of SEQ ID NO: 1986.

[1541] In one aspect, the present disclosure provides an antibody or antigen-binding fragment thereof comprising a CDR-H3 comprising the amino acid sequence of SEQ ID NO: 1715, and a CDR-L3 comprising the amino acid sequence of SEQ ID NO: 1986.

[1542] In one aspect, the present disclosure provides an antibody or antigen-binding fragment thereof comprising at least one, at least two, or all three VH CDR sequences selected from: a. CDR-H1 comprising the amino acid sequence of SEQ ID NO: 631, b. CDR-H2 comprising the amino acid sequence of SEQ ID NO: 1173, c. CDR-H3 comprising the amino acid sequence of SEQ ID NO: 1715, and a VL comprising the amino acid sequence of SEQ ID NO: 360.

[1543] In one aspect, the present disclosure provides an antibody or antigen-binding fragment thereof comprising at least one, at least two, or all three VL CDR sequences selected from: a. CDR-L1 comprising the amino acid sequence of SEQ ID NO: 902, b. CDR-L2 comprising the amino acid sequence of SEQ ID NO: 1444, c. CDR-L3 comprising the amino acid sequence of SEQ ID NO: 1986, and a VH comprising the amino acid sequence of SEQ ID NO: 89.

[1544] In one aspect, an antibody or antigen-binding fragment thereof is provided, wherein the antibody or antigen-binding fragment thereof comprises a heavy chain variable domain (VH) having at least 90%, 91%, 92%, 93%, 94%, 95%, 96%, 97%, 98%, 99%, or 100% sequence identity to the amino acid sequence SEQ ID NO: 89. In some embodiments, a VH sequence having at least 90%, 91%, 92%, 93%, 94%, 95%, 96%, 97%, 98%, or 99% identity contains substitutions (e.g., conservative substitutions), insertions, or deletions relative to the reference sequence, but an antibody or antigen-binding fragment thereof comprising that sequence retains the ability to bind to same antigen as of the parent (e.g., cancer associated antigen). In some embodiments, a total of 1 to 10 amino acids have been substituted, inserted and/or deleted in the amino acid sequence SEQ ID NO: 89. In some embodiments, substitutions, insertions, or deletions occur in regions outside the CDRs (e.g., in the FRs). Optionally, the antibody or antigen-binding fragment thereof comprises the VH sequence SEQ ID NO: 89, including one or more post-translational modifications of that sequence. In a particular embodiment, the VH comprises one, two or three CDRs selected from: a. CDR-H1, comprising the amino acid sequence SEQ ID NO: 631, b. CDR-H2, comprising the amino acid sequence SEQ ID NO: 1173, and c. CDR-H3, comprising the amino acid sequence SEQ ID NO: 1715.

[1545] In one aspect, an antibody or antigen-binding fragment thereof is provided, wherein the antibody or antigen-binding fragment thereof comprises a light chain variable domain (VL) having at least 90%, 91%, 92%, 93%, 94%, 95%, 96%, 97%, 98%, 99%, or 100% sequence identity to the amino acid sequence SEQ ID NO: 360. In some embodiments, a VL sequence having at least 90%, 91%, 92%, 93%, 94%, 95%, 96%, 97%, 98%, or 99% identity contains substitutions (e.g., conservative substitutions), insertions, or deletions relative to the reference sequence, but an antibody or antigen-binding fragment thereof comprising that sequence retains the ability to bind to same antigen as the parent (e.g., cancer associated antigen). In some embodiments, a total of 1 to 10 amino acids have been substituted, inserted and/or deleted in the amino acid sequence SEQ ID NO: 360. In some embodiments, the substitutions, insertions, or deletions occur in regions outside the CDRs (e.g., in the FRs). Optionally, the antibody or antigen-binding fragment thereof comprises the VL sequence SEQ ID NO: 360, including one or more post-translational modifications of that sequence. In a particular embodiment, the VL comprises one, two or three CDRs selected from: a. CDR-L1, comprising the amino acid sequence SEQ ID NO: 902, b. CDR-L2, comprising the amino acid sequence SEQ ID NO: 1444, and c. CDR-L3, comprising the amino acid sequence SEQ ID NO: 1986.

[1546] In one aspect, an antibody or antigen-binding fragment thereof is provided, wherein the antibody or antigen-binding fragment thereof comprises a VH as in any of the embodiments provided above, and a VL as in any of the embodiments provided above. In some embodiments, the antibody or antigen-binding fragment thereof comprises the VH amino acid sequence of SEQ ID NO: 89, and the VL amino acid sequence of SEQ ID NO: 360, optionally including post-translational modifications of those sequences.

### TESO1002

[1547] In one aspect, the present disclosure provides an antibody or antigen-binding fragment thereof comprising at least one or both variable regions selected from: a. VH comprising the amino acid sequence of SEQ ID NO: 90 and b. VL comprising the amino acid sequence of SEQ ID NO: 361.

[1548] In one aspect, the present disclosure provides an antibody or antigen-binding fragment thereof comprising at least one, two, three, four, five, or six CDRs selected from: a. CDR-H1 comprising the amino acid sequence of SEQ ID NO: 632, b. CDR-H2 comprising the amino acid sequence of SEQ ID NO: 1174, c. CDR-H3 comprising the amino acid sequence of SEQ ID NO: 1716, d. CDR-L1 comprising the amino acid sequence of SEQ ID NO: 903, e. CDR-L2 comprising the amino acid sequence of SEQ ID NO: 1445, and f. CDR-L3 comprising the amino acid sequence of SEQ ID NO: 1987. In one aspect, the present disclosure provides an antibody or antigen-binding fragment thereof comprising a CDR-H3 comprising the amino acid sequence of SEQ ID NO: 1716, and a CDR-L3 comprising the amino acid sequence of SEQ ID NO: 1987.

[1549] In one aspect, the present disclosure provides an antibody or antigen-binding fragment thereof comprising at least one, at least two, or all three VH CDR sequences selected from: a. CDR-H1 comprising the amino acid sequence of SEQ ID NO: 632, b. CDR-H2 comprising the amino acid sequence of SEQ ID NO: 1174, c. CDR-H3 comprising the amino acid sequence of SEQ ID NO: 1716, and a VL comprising the amino acid sequence of SEQ ID NO: 361.

[1550] In one aspect, the present disclosure provides an antibody or antigen-binding fragment thereof comprising at least one, at least two, or all three VL CDR sequences selected from: a. CDR-L1 comprising the amino acid sequence of SEQ ID NO: 903, b. CDR-L2 comprising the amino acid sequence of SEQ ID NO: 1445, c. CDR-L3 comprising the amino acid sequence of SEQ ID NO: 1987, and a VH comprising the amino acid sequence of SEQ ID NO: 90.

[1551] In one aspect, an antibody or antigen-binding fragment thereof is provided, wherein the antibody or antigen-binding fragment thereof comprises a heavy chain variable domain (VH) having at least 90%, 91%, 92%, 93%, 94%, 95%, 96%, 97%, 98%, 99%, or 100% sequence identity to the amino acid sequence SEQ ID NO: 90. In some embodiments, a VH sequence having at least 90%, 91%, 92%, 93%, 94%, 95%, 96%, 97%, 98%, or 99% identity contains substitutions (e.g., conservative substitutions), insertions, or deletions relative to the reference sequence, but an antibody or antigen-binding fragment thereof comprising that sequence retains the ability to bind to same antigen as of the parent (e.g., cancer associated antigen). In some embodiments, a total of 1 to 10 amino acids have been substituted, inserted and/or deleted in the amino acid sequence SEQ ID NO: 90. In some embodiments, substitutions, insertions, or deletions occur in regions outside the CDRs (e.g., in the FRs). Optionally, the antibody or antigen-binding fragment thereof comprises the VH sequence SEQ ID NO: 90, including one or more post-translational modifications of that sequence. In a particular embodiment, the VH comprises one, two or three CDRs selected from: a. CDR-H1, comprising the amino acid sequence SEQ ID NO: 632, b. CDR-H2, comprising the amino acid sequence SEQ ID NO: 1174, and c. CDR-H3, comprising the amino acid sequence SEQ ID NO: 1716.

[1552] In one aspect, an antibody or antigen-binding fragment thereof is provided, wherein the antibody or antigen-binding fragment thereof comprises a light chain variable domain (VL) having at least 90%, 91%, 92%, 93%, 94%, 95%, 96%, 97%, 98%, 99%, or 100% sequence identity to the amino acid sequence SEQ ID NO: 361. In some embodiments, a VL sequence having at least 90%, 91%, 92%, 93%, 94%, 95%, 96%, 97%, 98%, or 99% identity contains substitutions (e.g., conservative substitutions), insertions, or deletions relative to the reference sequence, but an antibody or antigen-binding fragment thereof comprising that sequence retains the ability to bind to same antigen as the parent (e.g., cancer associated antigen). In some embodiments, a total of 1 to 10 amino acids have been substituted, inserted and/or deleted in the amino acid sequence SEQ ID NO: 361. In some embodiments, the substitutions, insertions, or deletions occur in regions outside the CDRs (e.g., in the FRs). Optionally, the antibody or antigen-binding fragment thereof comprises the VL sequence SEQ ID NO: 361, including one or more post-translational modifications of that sequence. In a particular embodiment, the VL comprises one, two or three CDRs selected from: a. CDR-L1, comprising the amino acid sequence SEQ ID NO: 903, b. CDR-L2, comprising the amino acid sequence SEQ ID NO: 1445, and c. CDR-L3, comprising the amino acid sequence SEQ ID NO: 1987.

[1553] In one aspect, an antibody or antigen-binding fragment thereof is provided, wherein the antibody or antigen-binding fragment thereof comprises a VH as in any of the embodiments provided above, and a VL as in any of the embodiments provided above. In some embodiments, the antibody or antigen-binding fragment thereof comprises the VH amino acid sequence of SEQ ID NO: 90, and the VL amino acid sequence of SEQ ID NO: 361, optionally including post-translational modifications of those sequences.

### TESO1003

[1554] In one aspect, the present disclosure provides an antibody or antigen-binding fragment thereof comprising at least one or both variable regions selected from: a. VH comprising the amino acid sequence of SEQ ID NO: 91 and b. VL comprising the amino acid sequence of SEQ ID NO: 362.

[1555] In one aspect, the present disclosure provides an antibody or antigen-binding fragment thereof comprising at least one, two, three, four, five, or six CDRs selected from: a. CDR-H1 comprising the amino acid sequence of SEQ ID NO: 633, b. CDR-H2 comprising the amino acid sequence of SEQ ID NO: 1175, c. CDR-H3 comprising the amino acid sequence of SEQ ID NO: 1717, d. CDR-L1 comprising the amino acid sequence of SEQ ID NO: 904, e. CDR-L2 comprising the amino acid sequence of SEQ ID NO: 1446, and f. CDR-L3 comprising the amino acid sequence of SEQ ID NO: 1988.

[1556] In one aspect, the present disclosure provides an antibody or antigen-binding fragment thereof comprising a CDR-H3 comprising the amino acid sequence of SEQ ID NO: 1717, and a CDR-L3 comprising the amino acid sequence of SEQ ID NO: 1988.

[1557] In one aspect, the present disclosure provides an antibody or antigen-binding fragment thereof comprising at least one, at least two, or all three VH CDR sequences selected from: a. CDR-H1 comprising the amino acid sequence of SEQ ID NO: 633, b. CDR-H2 comprising the amino acid sequence of SEQ ID NO: 1175, c. CDR-H3 comprising the amino acid sequence of SEQ ID NO: 1717, and a VL comprising the amino acid sequence of SEQ ID NO: 362.

[1558] In one aspect, the present disclosure provides an antibody or antigen-binding fragment thereof comprising at least one, at least two, or all three VL CDR sequences selected from: a. CDR-L1 comprising the amino acid sequence of SEQ ID NO: 904, b. CDR-L2 comprising the amino acid sequence of SEQ ID NO: 1446, c. CDR-L3 comprising the amino acid sequence of SEQ ID NO: 1988, and a VH comprising the amino acid sequence of SEQ ID NO: 91.

[1559] In one aspect, an antibody or antigen-binding fragment thereof is provided, wherein the antibody or antigen-binding fragment thereof comprises a heavy chain variable domain (VH) having at least 90%, 91%, 92%, 93%, 94%, 95%, 96%, 97%, 98%, 99%, or 100% sequence identity to the amino acid sequence SEQ ID NO: 91. In some embodiments, a VH sequence having at least 90%, 91%, 92%, 93%, 94%, 95%, 96%, 97%, 98%, or 99% identity contains substitutions (e.g., conservative substitutions), insertions, or deletions relative to the reference sequence, but an antibody or antigen-binding fragment thereof comprising that sequence retains the ability to bind to same antigen as of the parent (e.g., cancer associated antigen). In some embodiments, a total of 1 to 10 amino acids have been substituted, inserted and/or deleted in the amino acid sequence SEQ ID NO: 91. In some embodiments, substitutions, insertions, or deletions occur in regions outside the CDRs (e.g., in the FRs). Optionally, the antibody or antigen-binding fragment thereof comprises the VH sequence SEQ ID NO: 91, including one or more post-translational modifications of that sequence. In a particular embodiment, the VH comprises one, two or three CDRs selected from: a. CDR-H1, comprising the amino acid sequence SEQ ID NO: 633, b. CDR-H2, comprising the amino acid sequence SEQ ID NO: 1175, and c. CDR-H3, comprising the amino acid sequence SEQ ID NO: 1717.

[1560] In one aspect, an antibody or antigen-binding fragment thereof is provided, wherein the antibody or antigen-binding fragment thereof comprises a light chain variable domain (VL) having at least 90%, 91%, 92%, 93%, 94%, 95%, 96%, 97%, 98%, 99%, or 100% sequence identity to the amino acid sequence SEQ ID NO: 362. In some embodiments, a VL sequence having at least 90%, 91%, 92%, 93%, 94%, 95%, 96%, 97%, 98%, or 99% identity contains substitutions (e.g., conservative substitutions), insertions, or deletions relative to the reference sequence, but an antibody or antigen-binding fragment thereof comprising that sequence retains the ability to bind to same antigen as the parent (e.g., cancer associated antigen). In some embodiments, a total of 1 to 10 amino acids have been substituted, inserted and/or deleted in the amino acid sequence SEQ ID NO: 362. In some embodiments, the substitutions, insertions, or deletions occur in regions outside the CDRs (e.g., in the FRs). Optionally, the antibody or antigen-binding fragment thereof comprises the VL sequence SEQ ID NO: 362, including one or more post-translational modifications of that sequence. In a particular embodiment, the VL comprises one, two or three CDRs selected from: a. CDR-L1, comprising the amino acid sequence SEQ ID NO: 904, b. CDR-L2, comprising the amino acid sequence SEQ ID NO: 1446, and c. CDR-L3, comprising the amino acid sequence SEQ ID NO: 1988.

[1561] In one aspect, an antibody or antigen-binding fragment thereof is provided, wherein the antibody or antigen-binding fragment thereof comprises a VH as in any of the embodiments provided above, and a VL as in any of the embodiments provided above. In some embodiments, the antibody or antigen-binding fragment thereof comprises the VH amino acid sequence of SEQ ID NO: 91, and the VL amino acid sequence of SEQ ID NO: 362, optionally including post-translational modifications of those sequences.

### TESO1004

[1562] In one aspect, the present disclosure provides an antibody or antigen-binding fragment thereof comprising at least one or both variable regions selected from: a. VH comprising the amino acid sequence of SEQ ID NO: 92 and b. VL comprising the amino acid sequence of SEQ ID NO: 363.

[1563] In one aspect, the present disclosure provides an antibody or antigen-binding fragment thereof comprising at least one, two, three, four, five, or six CDRs selected from: a. CDR-H1 comprising the amino acid sequence of SEQ ID NO: 634, b. CDR-H2 comprising the amino acid sequence of SEQ ID NO: 1176, c. CDR-H3 comprising the amino acid sequence of SEQ ID NO: 1718, d. CDR-L1 comprising the amino acid sequence of SEQ ID NO: 905, e. CDR-L2 comprising the amino acid sequence of SEQ ID NO: 1447, and f. CDR-L3 comprising the amino acid sequence of SEQ ID NO: 1989.

[1564] In one aspect, the present disclosure provides an antibody or antigen-binding fragment thereof comprising a CDR-H3 comprising the amino acid sequence of SEQ ID NO: 1718, and a CDR-L3 comprising the amino acid sequence of SEQ ID NO: 1989.

[1565] In one aspect, the present disclosure provides an antibody or antigen-binding fragment thereof comprising at least one, at least two, or all three VH CDR sequences selected from: a. CDR-H1 comprising the amino acid sequence of SEQ ID NO: 634, b. CDR-H2 comprising the amino acid sequence of SEQ ID NO: 1176, c. CDR-H3 comprising the amino acid sequence of SEQ ID NO: 1718, and a VL comprising the amino acid sequence of SEQ ID NO: 363.

[1566] In one aspect, the present disclosure provides an antibody or antigen-binding fragment thereof comprising at least one, at least two, or all three VL CDR sequences selected from: a. CDR-L1 comprising the amino acid sequence of SEQ ID NO: 905, b. CDR-L2 comprising the amino acid sequence of SEQ ID NO: 1447, c. CDR-L3 comprising the amino acid sequence of SEQ ID NO: 1989, and a VH comprising the amino acid sequence of SEQ ID NO: 92.

[1567] In one aspect, an antibody or antigen-binding fragment thereof is provided, wherein the antibody or antigen-binding fragment thereof comprises a heavy chain variable domain (VH) having at least 90%, 91%, 92%, 93%, 94%, 95%, 96%, 97%, 98%, 99%, or 100% sequence identity to the amino acid sequence SEQ ID NO: 92. In some embodiments, a VH sequence having at least 90%, 91%, 92%, 93%, 94%, 95%, 96%, 97%, 98%, or 99% identity contains substitutions (e.g., conservative substitutions), insertions, or deletions relative to the reference sequence, but an antibody or antigen-binding fragment thereof comprising that sequence retains the ability to bind to same antigen as of the parent (e.g., cancer associated antigen). In some embodiments, a total of 1 to 10 amino acids have been substituted, inserted and/or deleted in the amino acid sequence SEQ ID NO: 92. In some embodiments, substitutions, insertions, or deletions occur in regions outside the CDRs (e.g., in the FRs). Optionally, the antibody or antigen-binding fragment thereof comprises the VH sequence SEQ ID NO: 92, including one or more post-translational modifications of that sequence. In a particular embodiment, the VH comprises one, two or three CDRs selected from: a. CDR-H1, comprising the amino acid sequence SEQ ID NO: 634, b. CDR-H2, comprising the amino acid sequence SEQ ID NO: 1176, and c. CDR-H3, comprising the amino acid sequence SEQ ID NO: 1718.

[1568] In one aspect, an antibody or antigen-binding fragment thereof is provided, wherein the antibody or antigen-binding fragment thereof comprises a light chain variable domain (VL) having at least 90%, 91%, 92%, 93%, 94%, 95%, 96%, 97%, 98%, 99%, or 100% sequence identity to the amino acid sequence SEQ ID NO: 363. In some embodiments, a VL sequence having at least 90%, 91%, 92%, 93%, 94%, 95%, 96%, 97%, 98%, or 99% identity contains substitutions (e.g., conservative substitutions), insertions, or deletions relative to the reference sequence, but an antibody or antigen-binding fragment thereof comprising that sequence retains the ability to bind to same antigen as the parent (e.g., cancer associated antigen). In some embodiments, a total of 1 to 10 amino acids have been substituted, inserted and/or deleted in the amino acid sequence SEQ ID NO: 363. In some embodiments, the substitutions, insertions, or deletions occur in regions outside the CDRs (e.g., in the FRs). Optionally, the antibody or antigen-binding fragment thereof comprises the VL sequence SEQ ID NO: 363, including one or more post-translational modifications of that sequence. In a particular embodiment, the VL comprises one, two or three CDRs selected from: a. CDR-L1, comprising the amino acid sequence SEQ ID NO: 905, b. CDR-L2, comprising the amino acid sequence SEQ ID NO: 1447, and c. CDR-L3, comprising the amino acid sequence SEQ ID NO: 1989.

[1569] In one aspect, an antibody or antigen-binding fragment thereof is provided, wherein the antibody or antigen-binding fragment thereof comprises a VH as in any of the embodiments provided above, and a VL as in any of the embodiments provided above. In some embodiments, the antibody or antigen-binding fragment thereof comprises the VH amino acid sequence of SEQ ID NO: 92, and the VL amino acid sequence of SEQ ID NO: 363, optionally including post-translational modifications of those sequences.

### TESO1005

[1570] In one aspect, the present disclosure provides an antibody or antigen-binding fragment thereof comprising at least one or both variable regions selected from: a VH comprising the amino acid sequence of SEQ ID NO: 93 and b. VL comprising the amino acid sequence of SEQ ID NO: 364.

[1571] In one aspect, the present disclosure provides an antibody or antigen-binding fragment thereof comprising at least one, two, three, four, five, or six CDRs selected from: a. CDR-H1 comprising the amino acid sequence of SEQ ID NO: 635, b. CDR-H2 comprising the amino acid sequence of SEQ ID NO: 1177, c. CDR-H3 comprising the amino acid sequence of SEQ ID NO: 1719, d. CDR-L1 comprising the amino acid sequence of SEQ ID NO: 906, e. CDR-L2 comprising the amino acid sequence of SEQ ID NO: 1448, and f. CDR-L3 comprising the amino acid sequence of SEQ ID NO: 1990.

[1572] In one aspect, the present disclosure provides an antibody or antigen-binding fragment thereof comprising a CDR-H3 comprising the amino acid sequence of SEQ ID NO: 1719, and a CDR-L3 comprising the amino acid sequence of SEQ ID NO: 1990.

[1573] In one aspect, the present disclosure provides an antibody or antigen-binding fragment thereof comprising at least one, at least two, or all three VH CDR sequences selected from: a. CDR-H1 comprising the amino acid sequence of SEQ ID NO: 635, b. CDR-H2 comprising the amino acid sequence of SEQ ID NO: 1177, c. CDR-H3 comprising the amino acid sequence of SEQ ID NO: 1719, and a VL comprising the amino acid sequence of SEQ ID NO: 364.

[1574] In one aspect, the present disclosure provides an antibody or antigen-binding fragment thereof comprising at least one, at least two, or all three VL CDR sequences selected from: a. CDR-L1 comprising the amino acid sequence of SEQ ID NO: 906, b. CDR-L2 comprising the amino acid sequence of SEQ ID NO: 1448, c. CDR-L3 comprising the amino acid sequence of SEQ ID NO: 1990, and a VH comprising the amino acid sequence of SEQ ID NO: 93.

[1575] In one aspect, an antibody or antigen-binding fragment thereof is provided, wherein the antibody or antigen-binding fragment thereof comprises a heavy chain variable domain (VH) having at least 90%, 91%, 92%, 93%, 94%, 95%, 96%, 97%, 98%, 99%, or 100% sequence identity to the amino acid sequence SEQ ID NO: 93. In some embodiments, a VH sequence having at least 90%, 91%, 92%, 93%, 94%, 95%, 96%, 97%, 98%, or 99% identity contains substitutions (e.g., conservative substitutions), insertions, or deletions relative to the reference sequence, but an antibody or antigen-binding fragment thereof comprising that sequence retains the ability to bind to same antigen as of the parent (e.g., cancer associated antigen). In some embodiments, a total of 1 to 10 amino acids have been substituted, inserted and/or deleted in the amino acid sequence SEQ ID NO: 93. In some embodiments, substitutions, insertions, or deletions occur in regions outside the CDRs (e.g., in the FRs). Optionally, the antibody or antigen-binding fragment thereof comprises the VH sequence SEQ ID NO: 93, including one or more post-translational modifications of that sequence. In a particular embodiment, the VH comprises one, two or three CDRs selected from: a. CDR-H1, comprising the amino acid sequence SEQ ID NO: 635, b. CDR-H2, comprising the amino acid sequence SEQ ID NO: 1177, and c. CDR-H3, comprising the amino acid sequence SEQ ID NO: 1719.

[1576] In one aspect, an antibody or antigen-binding fragment thereof is provided, wherein the antibody or antigen-binding fragment thereof comprises a light chain variable domain (VL) having at least 90%, 91%, 92%, 93%, 94%, 95%, 96%, 97%, 98%, 99%, or 100% sequence identity to the amino acid sequence SEQ ID NO: 364. In some embodiments, a VL sequence having at least 90%, 91%, 92%, 93%, 94%, 95%, 96%, 97%, 98%, or 99% identity contains substitutions (e.g., conservative substitutions), insertions, or deletions relative to the reference sequence, but an antibody or antigen-binding fragment thereof comprising that sequence retains the ability to bind to same antigen as the parent (e.g., cancer associated antigen). In some embodiments, a total of 1 to 10 amino acids have been substituted, inserted and/or deleted in the amino acid sequence SEQ ID NO: 364. In some embodiments, the substitutions, insertions, or deletions occur in regions outside the CDRs (e.g., in the FRs). Optionally, the antibody or antigen-binding fragment thereof comprises the VL sequence SEQ ID NO: 364, including one or more post-translational modifications of that sequence. In a particular embodiment, the VL comprises one, two or three CDRs selected from: a. CDR-L1, comprising the amino acid sequence SEQ ID NO: 906, b. CDR-L2, comprising the amino acid sequence SEQ ID NO: 1448, and c. CDR-L3, comprising the amino acid sequence SEQ ID NO: 1990.

[1577] In one aspect, an antibody or antigen-binding fragment thereof is provided, wherein the antibody or antigen-binding fragment thereof comprises a VH as in any of the embodiments provided above, and a VL as in any of the embodiments provided above. In some embodiments, the antibody or antigen-binding fragment thereof comprises the VH amino acid sequence of SEQ ID NO: 93, and the VL amino acid sequence of SEQ ID NO: 364, optionally including post-translational modifications of those sequences.

### TESO1006

[1578] In one aspect, the present disclosure provides an antibody or antigen-binding fragment thereof comprising at least one or both variable regions selected from: a. VH comprising the amino acid sequence of SEQ ID NO: 94 and b. VL comprising the amino acid sequence of SEQ ID NO: 365.

[1579] In one aspect, the present disclosure provides an antibody or antigen-binding fragment thereof comprising at least one, two, three, four, five, or six CDRs selected from: a. CDR-H1 comprising the amino acid sequence of SEQ ID NO: 636, b. CDR-H2 comprising the amino acid sequence of SEQ ID NO: 1178, c. CDR-H3 comprising the amino acid sequence of SEQ ID NO: 1720, d. CDR-L1 comprising the amino acid sequence of SEQ ID NO: 907, e. CDR-L2 comprising the amino acid sequence of SEQ ID NO: 1449, and f. CDR-L3 comprising the amino acid sequence of SEQ ID NO: 1991.

[1580] In one aspect, the present disclosure provides an antibody or antigen-binding fragment thereof comprising at least one, at least two, or all three VH CDR sequences selected from: a. CDR-H1 comprising the amino acid sequence of SEQ ID NO: 636, b. CDR-H2 comprising the amino acid sequence of SEQ ID NO: 1178, c. CDR-H3 comprising the amino acid sequence of SEQ ID NO: 1720, and a VL comprising the amino acid sequence of SEQ ID NO: 365.

[1581] In one aspect, the present disclosure provides an antibody or antigen-binding fragment thereof comprising at least one, at least two, or all three VL CDR sequences selected from: a. CDR-L1 comprising the amino acid sequence of SEQ ID NO: 907, b. CDR-L2 comprising the amino acid sequence of SEQ ID NO: 1449, c. CDR-L3 comprising the amino acid sequence of SEQ ID NO: 1991, and a VH comprising the amino acid sequence of SEQ ID NO: 94.

[1582] In one aspect, an antibody or antigen-binding fragment thereof is provided, wherein the antibody or antigen-binding fragment thereof comprises a heavy chain variable domain (VH) having at least 90%, 91%, 92%, 93%, 94%, 95%, 96%, 97%, 98%, 99%, or 100% sequence identity to the amino acid sequence SEQ ID NO: 94. In some embodiments, a VH sequence having at least 90%, 91%, 92%, 93%, 94%, 95%, 96%, 97%, 98%, or 99% identity contains substitutions (e.g., conservative substitutions), insertions, or deletions relative to the reference sequence, but an antibody or antigen-binding fragment thereof comprising that sequence retains the ability to bind to same antigen as of the parent (e.g., cancer associated antigen). In some embodiments, a total of 1 to 10 amino acids have been substituted, inserted and/or deleted in the amino acid sequence SEQ ID NO: 94. In some embodiments, substitutions, insertions, or deletions occur in regions outside the CDRs (e.g., in the FRs). Optionally, the antibody or antigen-binding fragment thereof comprises the VH sequence SEQ ID NO: 94, including one or more post-translational modifications of that sequence. In a particular embodiment, the VH comprises one, two or three CDRs selected from: a. CDR-H1, comprising the amino acid sequence SEQ ID NO: 636, b. CDR-H2, comprising the amino acid sequence SEQ ID NO: 1178, and c. CDR-H3, comprising the amino acid sequence SEQ ID NO: 1720.

[1583] In one aspect, an antibody or antigen-binding fragment thereof is provided, wherein the antibody or antigen-binding fragment thereof comprises a light chain variable domain (VL) having at least 90%, 91%, 92%, 93%, 94%, 95%, 96%, 97%, 98%, 99%, or 100% sequence identity to the amino acid sequence SEQ ID NO: 365. In some embodiments, a VL sequence having at least 90%, 91%, 92%, 93%, 94%, 95%, 96%, 97%, 98%, or 99% identity contains substitutions (e.g., conservative substitutions), insertions, or deletions relative to the reference sequence, but an antibody or antigen-binding fragment thereof comprising that sequence retains the ability to bind to same antigen as the parent (e.g., cancer associated antigen). In some embodiments, a total of 1 to 10 amino acids have been substituted, inserted and/or deleted in the amino acid sequence SEQ ID NO: 365. In some embodiments, the substitutions, insertions, or deletions occur in regions outside the CDRs (e.g., in the FRs). Optionally, the antibody or antigen-binding fragment thereof comprises the VL sequence SEQ ID NO: 365, including one or more post-translational modifications of that sequence. In a particular embodiment, the VL comprises one, two or three CDRs selected from: a. CDR-L1, comprising the amino acid sequence SEQ ID NO: 907, b. CDR-L2, comprising the amino acid sequence SEQ ID NO: 1449, and c. CDR-L3, comprising the amino acid sequence SEQ ID NO: 1991.

[1584] In one aspect, an antibody or antigen-binding fragment thereof is provided, wherein the antibody or antigen-binding fragment thereof comprises a VH as in any of the embodiments provided above, and a VL as in any of the embodiments provided above. In some embodiments, the antibody or antigen-binding fragment thereof comprises the VH amino acid sequence of SEQ ID NO: 94, and the VL amino acid sequence of SEQ ID NO: 365, optionally including post-translational modifications of those sequences.

### TESO1007

[1585] In one aspect, the present disclosure provides an antibody or antigen-binding fragment thereof comprising at least one or both variable regions selected from: a VH comprising the amino acid sequence of SEQ ID NO: 95 and b. VL comprising the amino acid sequence of SEQ ID NO: 366.

[1586] In one aspect, the present disclosure provides an antibody or antigen-binding fragment thereof comprising at least one, two, three, four, five, or six CDRs selected from: a. CDR-H1 comprising the amino acid sequence of SEQ ID NO: 637, b. CDR-H2 comprising the amino acid sequence of SEQ ID NO: 1179, c. CDR-H3 comprising the amino acid sequence of SEQ ID NO: 1721, d. CDR-L1 comprising the amino acid sequence of SEQ ID NO: 908, e. CDR-L2 comprising the amino acid sequence of SEQ ID NO: 1450, and f. CDR-L3 comprising the amino acid sequence of SEQ ID NO: 1992.

[1587] In one aspect, the present disclosure provides an antibody or antigen-binding fragment thereof comprising a CDR-H3 comprising the amino acid sequence of SEQ ID NO: 1721, and a CDR-L3 comprising the amino acid sequence of SEQ ID NO: 1992.

[1588] In one aspect, the present disclosure provides an antibody or antigen-binding fragment thereof comprising at least one, at least two, or all three VH CDR sequences selected from: a. CDR-H1 comprising the amino acid sequence of SEQ ID NO: 637, b. CDR-H2 comprising the amino acid sequence of SEQ ID NO: 1179, c. CDR-H3 comprising the amino acid sequence of SEQ ID NO: 1721, and a VL comprising the amino acid sequence of SEQ ID NO: 366.

[1589] In one aspect, the present disclosure provides an antibody or antigen-binding fragment thereof comprising at least one, at least two, or all three VL CDR sequences selected from: a. CDR-L1 comprising the amino acid sequence of SEQ ID NO: 908, b. CDR-L2 comprising the amino acid sequence of SEQ ID NO: 1450, c. CDR-L3 comprising the amino acid sequence of SEQ ID NO: 1992, and a VH comprising the amino acid sequence of SEQ ID NO: 95.

[1590] In one aspect, an antibody or antigen-binding fragment thereof is provided, wherein the antibody or antigen-binding fragment thereof comprises a heavy chain variable domain (VH) having at least 90%, 91%, 92%, 93%, 94%, 95%, 96%, 97%, 98%, 99%, or 100% sequence identity to the amino acid sequence SEQ ID NO: 95. In some embodiments, a VH sequence having at least 90%, 91%, 92%, 93%, 94%, 95%, 96%, 97%, 98%, or 99% identity contains substitutions (e.g., conservative substitutions), insertions, or deletions relative to the reference sequence, but an antibody or antigen-binding fragment thereof comprising that sequence retains the ability to bind to same antigen as of the parent (e.g., cancer associated antigen). In some embodiments, a total of 1 to 10 amino acids have been substituted, inserted and/or deleted in the amino acid sequence SEQ ID NO: 95. In some embodiments, substitutions, insertions, or deletions occur in regions outside the CDRs (e.g., in the FRs). Optionally, the antibody or antigen-binding fragment thereof comprises the VH sequence SEQ ID NO: 95, including one or more post-translational modifications of that sequence. In a particular embodiment, the VH comprises one, two or three CDRs selected from: a. CDR-H1, comprising the amino acid sequence SEQ ID NO: 637, b. CDR-H2, comprising the amino acid sequence SEQ ID NO: 1179, and c. CDR-H3, comprising the amino acid sequence SEQ ID NO: 1721.

[1591] In one aspect, an antibody or antigen-binding fragment thereof is provided, wherein the antibody or antigen-binding fragment thereof comprises a light chain variable domain (VL) having at least 90%, 91%, 92%, 93%, 94%, 95%, 96%, 97%, 98%, 99%, or 100% sequence identity to the amino acid sequence SEQ ID NO: 366. In some embodiments, a VL sequence having at least 90%, 91%, 92%, 93%, 94%, 95%, 96%, 97%, 98%, or 99% identity contains substitutions (e.g., conservative substitutions), insertions, or deletions relative to the reference sequence, but an antibody or antigen-binding fragment thereof comprising that sequence retains the ability to bind to same antigen as the parent (e.g., cancer associated antigen). In some embodiments, a total of 1 to 10 amino acids have been substituted, inserted and/or deleted in the amino acid sequence SEQ ID NO: 366. In some embodiments, the substitutions, insertions, or deletions occur in regions outside the CDRs (e.g., in the FRs). Optionally, the antibody or antigen-binding fragment thereof comprises the VL sequence SEQ ID NO: 366, including one or more post-translational modifications of that sequence. In a particular embodiment, the VL comprises one, two or three CDRs selected from: a. CDR-L1, comprising the amino acid sequence SEQ ID NO: 908, b. CDR-L2, comprising the amino acid sequence SEQ ID NO: 1450, and c. CDR-L3, comprising the amino acid sequence SEQ ID NO: 1992.

[1592] In one aspect, an antibody or antigen-binding fragment thereof is provided, wherein the antibody or antigen-binding fragment thereof comprises a VH as in any of the embodiments provided above, and a VL as in any of the embodiments provided above. In some embodiments, the antibody or antigen-binding fragment thereof comprises the VH amino acid sequence of SEQ ID NO: 95, and the VL amino acid sequence of SEQ ID NO: 366, optionally including post-translational modifications of those sequences.

### THNS1001

[1593] In one aspect, the present disclosure provides an antibody or antigen-binding fragment thereof comprising at least one or both variable regions selected from: a. VH comprising the amino acid sequence of SEQ ID NO: 96 and VL comprising the amino acid sequence of SEQ ID NO: 367.

[1594] In one aspect, the present disclosure provides an antibody or antigen-binding fragment thereof comprising at least one, two, three, four, five, or six CDRs selected from: a. CDR-H1 comprising the amino acid sequence of SEQ ID NO: 638, b. CDR-H2 comprising the amino acid sequence of SEQ ID NO: 1180, c. CDR-H3 comprising the amino acid sequence of SEQ ID NO: 1722, d. CDR-L1 comprising the amino acid sequence of SEQ ID NO: 909, e. CDR-L2 comprising the amino acid sequence of SEQ ID NO: 1451, f. CDR-L3 comprising the amino acid sequence of SEQ ID NO: 1993.

[1595] In one aspect, the present disclosure provides an antibody or antigen-binding fragment thereof comprising a CDR-H3 comprising the amino acid sequence of SEQ ID NO: 1722, and a CDR-L3 comprising the amino acid sequence of SEQ ID NO: 1993.

[1596] In one aspect, the present disclosure provides an antibody or antigen-binding fragment thereof comprising at least one, at least two, or all three VH CDR sequences selected from: a. CDR-H1 comprising the amino acid sequence of SEQ ID NO: 638, b. CDR-H2 comprising the amino acid sequence of SEQ ID NO: 1180, c. CDR-H3 comprising the amino acid sequence of SEQ ID NO: 1722, and a VL comprising the amino acid sequence of SEQ ID NO: 367.

[1597] In one aspect, the present disclosure provides an antibody or antigen-binding fragment thereof comprising at least one, at least two, or all three VL CDR sequences selected from: a. CDR-L1 comprising the amino acid sequence of SEQ ID NO: 909, b. CDR-L2 comprising the amino acid sequence of SEQ ID NO: 1451, c. CDR-L3 comprising the amino acid sequence of SEQ ID NO: 1993, and a VH comprising the amino acid sequence of SEQ ID NO: 96.

[1598] In one aspect, an antibody or antigen-binding fragment thereof is provided, wherein the antibody or antigen-binding fragment thereof comprises a heavy chain variable domain (VH) having at least 90%, 91%, 92%, 93%, 94%, 95%, 96%, 97%, 98%, 99%, or 100% sequence identity to the amino acid sequence SEQ ID NO: 96. In some embodiments, a VH sequence having at least 90%, 91%, 92%, 93%, 94%, 95%, 96%, 97%, 98%, or 99% identity contains substitutions (e.g., conservative substitutions), insertions, or deletions relative to the reference sequence, but an antibody or antigen-binding fragment thereof comprising that sequence retains the ability to bind to same antigen as of the parent (e.g., cancer associated antigen). In some embodiments, a total of 1 to 10 amino acids have been substituted, inserted and/or deleted in the amino acid sequence SEQ ID NO: 96. In some embodiments, substitutions, antigen-binding fragment thereof comprises the VH sequence SEQ ID NO: 96, including one or more post-translational modifications of that sequence. In a particular embodiment, the VH comprises one, two or three CDRs selected from: a. CDR-H1, comprising the amino acid sequence SEQ ID NO: 638, b. CDR-H2, comprising the amino acid sequence SEQ ID NO: 1180, and c. CDR-H3, comprising the amino acid sequence SEQ ID NO: 1722.

[1599] In one aspect, an antibody or antigen-binding fragment thereof is provided, wherein the antibody or antigen-binding fragment thereof comprises a light chain variable domain (VL) having at least 90%, 91%, 92%, 93%, 94%, 95%, 96%, 97%, 98%, 99%, or 100% sequence identity to the amino acid sequence SEQ ID NO: 367. In some embodiments, a VL sequence having at least 90%, 91%, 92%, 93%, 94%, 95%, 96%, 97%, 98%, or 99% identity contains substitutions (e.g., conservative substitutions), insertions, or deletions relative to the reference sequence, but an antibody or antigen-binding fragment thereof comprising that sequence retains the ability to bind to same antigen as the parent (e.g., cancer associated antigen). In some embodiments, a total of 1 to 10 amino acids have been substituted, inserted and/or deleted in the amino acid sequence SEQ ID NO: 367. In some embodiments, the substitutions, insertions, or deletions occur in regions outside the CDRs (e.g., in the FRs). Optionally, the antibody or antigen-binding fragment thereof comprises the VL sequence SEQ ID NO: 367, including one or more post-translational modifications of that sequence. In a particular embodiment, the VL comprises one, two or three CDRs selected from: a. CDR-L1, comprising the amino acid sequence SEQ ID NO: 909, b. CDR-L2, comprising the amino acid sequence SEQ ID NO: 1451, and c. CDR-L3, comprising the amino acid sequence SEQ ID NO: 1993.

[1600] In one aspect, an antibody or antigen-binding fragment thereof is provided, wherein the antibody or antigen-binding fragment thereof comprises a VH as in any of the embodiments provided above, and a VL as in any of the embodiments provided above. In some embodiments, the antibody or antigen-binding fragment thereof comprises the VH amino acid sequence of SEQ ID NO: 96, and the VL amino acid sequence of SEQ ID NO: 367, optionally including post-translational modifications of those sequences.

### THNS1002

[1601] In one aspect, the present disclosure provides an antibody or antigen-binding fragment thereof comprising at least one or both variable regions selected from: a. VH comprising the amino acid sequence of SEQ ID NO: 97 and b. VL comprising the amino acid sequence of SEQ ID NO: 368.

[1602] In one aspect, the present disclosure provides an antibody or antigen-binding fragment thereof comprising at least one, two, three, four, five, or six CDRs selected from: a. CDR-H1 comprising the amino acid sequence of SEQ ID NO: 639, b. CDR-H2 comprising the amino acid sequence of SEQ ID NO: 1181, c. CDR-H3 comprising the amino acid sequence of SEQ ID NO: 1723, d. CDR-L1 comprising the amino acid sequence of SEQ ID NO: 910, e. CDR-L2 comprising the amino acid sequence of SEQ ID NO: 1452, and f. CDR-L3 comprising the amino acid sequence of SEQ ID NO: 1994.

[1603] In one aspect, the present disclosure provides an antibody or antigen-binding fragment thereof comprising a CDR-H3 comprising the amino acid sequence of SEQ ID NO: 1723, and a CDR-L3 comprising the amino acid sequence of SEQ ID NO: 1994.

[1604] In one aspect, the present disclosure provides an antibody or antigen-binding fragment thereof comprising at least one, at least two, or all three VH CDR sequences selected from: a. CDR-H1 comprising the amino acid sequence of SEQ ID NO: 639, b. CDR-H2 comprising the amino acid sequence of SEQ ID NO: 1181, c. CDR-H3 comprising the amino acid sequence of SEQ ID NO: 1723, and a VL comprising the amino acid sequence of SEQ ID NO: 368.

[1605] In one aspect, the present disclosure provides an antibody or antigen-binding fragment thereof comprising at least one, at least two, or all three VL CDR sequences selected from: a. CDR-L1 comprising the amino acid sequence of SEQ ID NO: 910, b. CDR-L2 comprising the amino acid sequence of SEQ ID NO: 1452, c. CDR-L3 comprising the amino acid sequence of SEQ ID NO: 1994, and a VH comprising the amino acid sequence of SEQ ID NO: 97.

[1606] In one aspect, an antibody or antigen-binding fragment thereof is provided, wherein the antibody or antigen-binding fragment thereof comprises a heavy chain variable domain (VH) having at least 90%, 91%, 92%, 93%, 94%, 95%, 96%, 97%, 98%, 99%, or 100% sequence identity to the amino acid sequence SEQ ID NO: 97. In some embodiments, a VH sequence having at least 90%, 91%, 92%, 93%, 94%, 95%, 96%, 97%, 98%, or 99% identity contains substitutions (e.g., conservative substitutions), insertions, or deletions relative to the reference sequence, but an antibody or antigen-binding fragment thereof comprising that sequence retains the ability to bind to same antigen as of the parent (e.g., cancer associated antigen). In some embodiments, a total of 1 to 10 amino acids have been substituted, inserted and/or deleted in the amino acid sequence SEQ ID NO: 97. In some embodiments, substitutions, insertions, or deletions occur in regions outside the CDRs (e.g., in the FRs). Optionally, the antibody or antigen-binding fragment thereof comprises the VH sequence SEQ ID NO: 97, including one or more post-translational modifications of that sequence. In a particular embodiment, the VH comprises one, two or three CDRs selected from: a. CDR-H1, comprising the amino acid sequence SEQ ID NO: 639, b. CDR-H2, comprising the amino acid sequence SEQ ID NO: 1181, and c. CDR-H3, comprising the amino acid sequence SEQ ID NO: 1723.

[1607] In one aspect, an antibody or antigen-binding fragment thereof is provided, wherein the antibody or antigen-binding fragment thereof comprises a light chain variable domain (VL) having at least 90%, 91%, 92%, 93%, 94%, 95%, 96%, 97%, 98%, 99%, or 100% sequence identity to the amino acid sequence SEQ ID NO: 368. In some embodiments, a VL sequence having at least 90%, 91%, 92%, 93%, 94%, 95%, 96%, 97%, 98%, or 99% identity contains substitutions (e.g., conservative substitutions), insertions, or deletions relative to the reference sequence, but an antibody or antigen-binding fragment thereof comprising that sequence retains the ability to bind to same antigen as the parent (e.g., cancer associated antigen). In some embodiments, a total of 1 to 10 amino acids have been substituted, inserted and/or deleted in the amino acid sequence SEQ ID NO: 368. In some embodiments, the substitutions, insertions, or deletions occur in regions outside the CDRs (e.g., in the FRs). Optionally, the antibody or antigen-binding fragment thereof comprises the VL sequence SEQ ID NO: 368, including one or more post-translational modifications of that sequence. In a particular embodiment, the VL comprises one, two or three CDRs selected from: a. CDR-L1, comprising the amino acid sequence SEQ ID NO: 910, b. CDR-L2, comprising the amino acid sequence SEQ ID NO: 1452, and c. CDR-L3, comprising the amino acid sequence SEQ ID NO: 1994.

[1608] In one aspect, an antibody or antigen-binding fragment thereof is provided, wherein the antibody or antigen-binding fragment thereof comprises a VH as in any of the embodiments provided above, and a VL as in any of the embodiments provided above. In some embodiments, the antibody or antigen-binding fragment thereof comprises the VH amino acid sequence of SEQ ID NO: 97, and the VL amino acid sequence of SEQ ID NO: 368, optionally including post-translational modifications of those sequences.

### THNS1003

[1609] In one aspect, the present disclosure provides an antibody or antigen-binding fragment thereof comprising at least one or both variable regions selected from: a. VH comprising the amino acid sequence of SEQ ID NO: 98 and b. VL comprising the amino acid sequence of SEQ ID NO: 369.

[1610] In one aspect, the present disclosure provides an antibody or antigen-binding fragment thereof comprising at least one, two, three, four, five, or six CDRs selected from: a. CDR-H1 comprising the amino acid sequence of SEQ ID NO: 640, b. CDR-H2 comprising the amino acid sequence of SEQ ID NO: 1182, c. CDR-H3 comprising the amino acid sequence of SEQ ID NO: 1724, d. CDR-L1 comprising the amino acid sequence of SEQ ID NO: 911, e. CDR-L2 comprising the amino acid sequence of SEQ ID NO: 1453, and f. CDR-L3 comprising the amino acid sequence of SEQ ID NO: 1995.

[1611] In one aspect, the present disclosure provides an antibody or antigen-binding fragment thereof comprising a CDR-H3 comprising the amino acid sequence of SEQ ID NO: 1724, and a CDR-L3 comprising the amino acid sequence of SEQ ID NO: 1995.

[1612] In one aspect, the present disclosure provides an antibody or antigen-binding fragment thereof comprising at least one, at least two, or all three VH CDR sequences selected from: a. CDR-H1 comprising the amino acid sequence of SEQ ID NO: 640, b. CDR-H2 comprising the amino acid sequence of SEQ ID NO: 1182, c. CDR-H3 comprising the amino acid sequence of SEQ ID NO: 1724, and a VL comprising the amino acid sequence of SEQ ID NO: 369.

[1613] In one aspect, the present disclosure provides an antibody or antigen-binding fragment thereof comprising at least one, at least two, or all three VL CDR sequences selected from: a. CDR-L1 comprising the amino acid sequence of SEQ ID NO: 911, b. CDR-L2 comprising the amino acid sequence of SEQ ID NO: 1453, c. CDR-L3 comprising the amino acid sequence of SEQ ID NO: 1995, and a VH comprising the amino acid sequence of SEQ ID NO: 98.

[1614] In one aspect, an antibody or antigen-binding fragment thereof is provided, wherein the antibody or antigen-binding fragment thereof comprises a heavy chain variable domain (VH) having at least 90%, 91%, 92%, 93%, 94%, 95%, 96%, 97%, 98%, 99%, or 100% sequence identity to the amino acid sequence SEQ ID NO: 98. In some embodiments, a VH sequence having at least 90%, 91%, 92%, 93%, 94%, 95%, 96%, 97%, 98%, or 99% identity contains substitutions (e.g., conservative substitutions), insertions, or deletions relative to the reference sequence, but an antibody or antigen-binding fragment thereof comprising that sequence retains the ability to bind to same antigen as of the parent (e.g., cancer associated antigen). In some embodiments, a total of 1 to 10 amino acids have been substituted, inserted and/or deleted in the amino acid sequence SEQ ID NO: 98. In some embodiments, substitutions, insertions, or deletions occur in regions outside the CDRs (e.g., in the FRs). Optionally, the antibody or antigen-binding fragment thereof comprises the VH sequence SEQ ID NO: 98, including one or more post-translational modifications of that sequence. In a particular embodiment, the VH comprises one, two or three CDRs selected from: a. CDR-H1, comprising the amino acid sequence SEQ ID NO: 640, b. CDR-H2, comprising the amino acid sequence SEQ ID NO: 1182, and c. CDR-H3, comprising the amino acid sequence SEQ ID NO: 1724.

[1615] In one aspect, an antibody or antigen-binding fragment thereof is provided, wherein the antibody or antigen-binding fragment thereof comprises a light chain variable domain (VL) having at least 90%, 91%, 92%, 93%, 94%, 95%, 96%, 97%, 98%, 99%, or 100% sequence identity to the amino acid sequence SEQ ID NO: 369. In some embodiments, a VL sequence having at least 90%, 91%, 92%, 93%, 94%, 95%, 96%, 97%, 98%, or 99% identity contains substitutions (e.g., conservative substitutions), insertions, or deletions relative to the reference sequence, but an antibody or antigen-binding fragment thereof comprising that sequence retains the ability to bind to same antigen as the parent (e.g., cancer associated antigen). In some embodiments, a total of 1 to 10 amino acids have been substituted, inserted and/or deleted in the amino acid sequence SEQ ID NO: 369. In some embodiments, the substitutions, insertions, or deletions occur in regions outside the CDRs (e.g., in the FRs). Optionally, the antibody or antigen-binding fragment thereof comprises the VL sequence SEQ ID NO: 369, including one or more post-translational modifications of that sequence. In a particular embodiment, the VL comprises one, two or three CDRs selected from: a. CDR-L1, comprising the amino acid sequence SEQ ID NO: 911, b. CDR-L2, comprising the amino acid sequence SEQ ID NO: 1453, and c. CDR-L3, comprising the amino acid sequence SEQ ID NO: 1995.

[1616] In one aspect, an antibody or antigen-binding fragment thereof is provided, wherein the antibody or antigen-binding fragment thereof comprises a VH as in any of the embodiments provided above, and a VL as in any of the embodiments provided above. In some embodiments, the antibody or antigen-binding fragment thereof comprises the VH amino acid sequence of SEQ ID NO: 98, and the VL amino acid sequence of SEQ ID NO: 369, optionally including post-translational modifications of those sequences.

### THNS1004

[1617] In one aspect, the present disclosure provides an antibody or antigen-binding fragment thereof comprising at least one or both variable regions selected from: a. VH comprising the amino acid sequence of SEQ ID NO: 99 and b. VL comprising the amino acid sequence of SEQ ID NO: 370.

[1618] In one aspect, the present disclosure provides an antibody or antigen-binding fragment thereof comprising at least one, two, three, four, five, or six CDRs selected from: a. CDR-H1 comprising the amino acid sequence of SEQ ID NO: 641, b. CDR-H2 comprising the amino acid sequence of SEQ ID NO: 1183, c. CDR-H3 comprising the amino acid sequence of SEQ ID NO: 1725, d. CDR-L1 comprising the amino acid sequence of SEQ ID NO: 912, e. CDR-L2 comprising the amino acid sequence of SEQ ID NO: 1454, and f. CDR-L3 comprising the amino acid sequence of SEQ ID NO: 1996.

[1619] In one aspect, the present disclosure provides an antibody or antigen-binding fragment thereof comprising a CDR-H3 comprising the amino acid sequence of SEQ ID NO: 1725, and a CDR-L3 comprising the amino acid sequence of SEQ ID NO: 1996.

[1620] In one aspect, the present disclosure provides an antibody or antigen-binding fragment thereof comprising at least one, at least two, or all three VH CDR sequences selected from: a. CDR-H1 comprising the amino acid sequence of SEQ ID NO: 641, b. CDR-H2 comprising the amino acid sequence of SEQ ID NO: 1183, c. CDR-H3 comprising the amino acid sequence of SEQ ID NO: 1725, and a VL comprising the amino acid sequence of SEQ ID NO: 370.

[1621] In one aspect, the present disclosure provides an antibody or antigen-binding fragment thereof comprising at least one, at least two, or all three VL CDR sequences selected from: a. CDR-L1 comprising the amino acid sequence of SEQ ID NO: 912, b. CDR-L2 comprising the amino acid sequence of SEQ ID NO: 1454, c. CDR-L3 comprising the amino acid sequence of SEQ ID NO: 1996, and a VH comprising the amino acid sequence of SEQ ID NO: 99.

[1622] In one aspect, an antibody or antigen-binding fragment thereof is provided, wherein the antibody or antigen-binding fragment thereof comprises a heavy chain variable domain (VH) having at least 90%, 91%, 92%, 93%, 94%, 95%, 96%, 97%, 98%, 99%, or 100% sequence identity to the amino acid sequence SEQ ID NO: 99. In some embodiments, a VH sequence having at least 90%, 91%, 92%, 93%, 94%, 95%, 96%, 97%, 98%, or 99% identity contains substitutions (e.g., conservative substitutions), insertions, or deletions relative to the reference sequence, but an antibody or antigen-binding fragment thereof comprising that sequence retains the ability to bind to same antigen as of the parent (e.g., cancer associated antigen). In some embodiments, a total of 1 to 10 amino acids have been substituted, inserted and/or deleted in the amino acid sequence SEQ ID NO: 99. In some embodiments, substitutions, insertions, or deletions occur in regions outside the CDRs (e.g., in the FRs). Optionally, the antibody or antigen-binding fragment thereof comprises the VH sequence SEQ ID NO: 99, including one or more post-translational modifications of that sequence. In a particular embodiment, the VH comprises one, two or three CDRs selected from: a. CDR-H1, comprising the amino acid sequence SEQ ID NO: 641, b. CDR-H2, comprising the amino acid sequence SEQ ID NO: 1183, and c. CDR-H3, comprising the amino acid sequence SEQ ID NO: 1725.

[1623] In one aspect, an antibody or antigen-binding fragment thereof is provided, wherein the antibody or antigen-binding fragment thereof comprises a light chain variable domain (VL) having at least 90%, 91%, 92%, 93%, 94%, 95%, 96%, 97%, 98%, 99%, or 100% sequence identity to the amino acid sequence SEQ ID NO: 370. In some embodiments, a VL sequence having at least 90%, 91%, 92%, 93%, 94%, 95%, 96%, 97%, 98%, or 99% identity contains substitutions (e.g., conservative substitutions), insertions, or deletions relative to the reference sequence, but an antibody or antigen-binding fragment thereof comprising that sequence retains the ability to bind to same antigen as the parent (e.g., cancer associated antigen). In some embodiments, a total of 1 to 10 amino acids have been substituted, inserted and/or deleted in the amino acid sequence SEQ ID NO: 370. In some embodiments, the substitutions, antigen-binding fragment thereof comprises the VL sequence SEQ ID NO: 370, including one or more post-translational modifications of that sequence. In a particular embodiment, the VL comprises one, two or three CDRs selected from: a. CDR-L1, comprising the amino acid sequence SEQ ID NO: 912, b. CDR-L2, comprising the amino acid sequence SEQ ID NO: 1454, and c. CDR-L3, comprising the amino acid sequence SEQ ID NO: 1996.

[1624] In one aspect, an antibody or antigen-binding fragment thereof is provided, wherein the antibody or antigen-binding fragment thereof comprises a VH as in any of the embodiments provided above, and a VL as in any of the embodiments provided above. In some embodiments, the antibody or antigen-binding fragment thereof comprises the VH amino acid sequence of SEQ ID NO: 99, and the VL amino acid sequence of SEQ ID NO: 370, optionally including post-translational modifications of those sequences.

### THNS1005

[1625] In one aspect, the present disclosure provides an antibody or antigen-binding fragment thereof comprising at least one or both variable regions selected from: a. VH comprising the amino acid sequence of SEQ ID NO: 100 and b. VL comprising the amino acid sequence of SEQ ID NO: 371.

[1626] In one aspect, the present disclosure provides an antibody or antigen-binding fragment thereof comprising at least one, two, three, four, five, or six CDRs selected from: a. CDR-H1 comprising the amino acid sequence of SEQ ID NO: 642, b. CDR-H2 comprising the amino acid sequence of SEQ ID NO: 1184, c. CDR-H3 comprising the amino acid sequence of SEQ ID NO: 1726, d. CDR-L1 comprising the amino acid sequence of SEQ ID NO: 913, e. CDR-L2 comprising the amino acid sequence of SEQ ID NO: 1455, and f. CDR-L3 comprising the amino acid sequence of SEQ ID NO: 1997.

[1627] In one aspect, the present disclosure provides an antibody or antigen-binding fragment thereof comprising a CDR-H3 comprising the amino acid sequence of SEQ ID NO: 1726, and a CDR-L3 comprising the amino acid sequence of SEQ ID NO: 1997.

[1628] In one aspect, the present disclosure provides an antibody or antigen-binding fragment thereof comprising at least one, at least two, or all three VH CDR sequences selected from: a. CDR-H1 comprising the amino acid sequence of SEQ ID NO: 642, b. CDR-H2 comprising the amino acid sequence of SEQ ID NO: 1184, c. CDR-H3 comprising the amino acid sequence of SEQ ID NO: 1726, and a VL comprising the amino acid sequence of SEQ ID NO: 371.

[1629] In one aspect, the present disclosure provides an antibody or antigen-binding fragment thereof comprising at least one, at least two, or all three VL CDR sequences selected from: a. CDR-L1 comprising the amino acid sequence of SEQ ID NO: 913, b. CDR-L2 comprising the amino acid sequence of SEQ ID NO: 1455, c. CDR-L3 comprising the amino acid sequence of SEQ ID NO: 1997, and a VH comprising the amino acid sequence of SEQ ID NO: 100.

[1630] In one aspect, an antibody or antigen-binding fragment thereof is provided, wherein the antibody or antigen-binding fragment thereof comprises a heavy chain variable domain (VH) having at least 90%, 91%, 92%, 93%, 94%, 95%, 96%, 97%, 98%, 99%, or 100% sequence identity to the amino acid sequence SEQ ID NO: 100. In some embodiments, a VH sequence having at least 90%, 91%, 92%, 93%, 94%, 95%, 96%, 97%, 98%, or 99% identity contains substitutions (e.g., conservative substitutions), thereof comprising that sequence retains the ability to bind to same antigen as of the parent (e.g., cancer associated antigen). In some embodiments, a total of 1 to 10 amino acids have been substituted, inserted and/or deleted in the amino acid sequence SEQ ID NO: 100. In some embodiments, substitutions, insertions, or deletions occur in regions outside the CDRs (e.g., in the FRs). Optionally, the antibody or antigen-binding fragment thereof comprises the VH sequence SEQ ID NO: 100, including one or more post-translational modifications of that sequence. In a particular embodiment, the VH comprises one, two or three CDRs selected from: a. CDR-H1, comprising the amino acid sequence SEQ ID NO: 642, b. CDR-H2, comprising the amino acid sequence SEQ ID NO: 1184, and c. CDR-H3, comprising the amino acid sequence SEQ ID NO: 1726.

[1631] In one aspect, an antibody or antigen-binding fragment thereof is provided, wherein the antibody or antigen-binding fragment thereof comprises a light chain variable domain (VL) having at least 90%, 91%, 92%, 93%, 94%, 95%, 96%, 97%, 98%, 99%, or 100% sequence identity to the amino acid sequence SEQ ID NO: 371. In some embodiments, a VL sequence having at least 90%, 91%, 92%, 93%, 94%, 95%, 96%, 97%, 98%, or 99% identity contains substitutions (e.g., conservative substitutions), insertions, or deletions relative to the reference sequence, but an antibody or antigen-binding fragment thereof comprising that sequence retains the ability to bind to same antigen as the parent (e.g., cancer associated antigen). In some embodiments, a total of 1 to 10 amino acids have been substituted, inserted and/or deleted in the amino acid sequence SEQ ID NO: 371. In some embodiments, the substitutions, insertions, or deletions occur in regions outside the CDRs (e.g., in the FRs). Optionally, the antibody or antigen-binding fragment thereof comprises the VL sequence SEQ ID NO: 371, including one or more post-translational modifications of that sequence. In a particular embodiment, the VL comprises one, two or three CDRs selected from: a. CDR-L1, comprising the amino acid sequence SEQ ID NO: 913, b. CDR-L2, comprising the amino acid sequence SEQ ID NO: 1455, and c. CDR-L3, comprising the amino acid sequence SEQ ID NO: 1997.

[1632] In one aspect, an antibody or antigen-binding fragment thereof is provided, wherein the antibody or antigen-binding fragment thereof comprises a VH as in any of the embodiments provided above, and a VL as in any of the embodiments provided above. In some embodiments, the antibody or antigen-binding fragment thereof comprises the VH amino acid sequence of SEQ ID NO: 100, and the VL amino acid sequence of SEQ ID NO: 371, optionally including post-translational modifications of those sequences.

### THNS1006

[1633] In one aspect, the present disclosure provides an antibody or antigen-binding fragment thereof comprising at least one or both variable regions selected from: a. VH comprising the amino acid sequence of SEQ ID NO: 101 and b. VL comprising the amino acid sequence of SEQ ID NO: 372.

[1634] In one aspect, the present disclosure provides an antibody or antigen-binding fragment thereof comprising at least one, two, three, four, five, or six CDRs selected from: a. CDR-H1 comprising the amino acid sequence of SEQ ID NO: 643, b. CDR-H2 comprising the amino acid sequence of SEQ ID NO: 1185, c. CDR-H3 comprising the amino acid sequence of SEQ ID NO: 1727, d. CDR-L1 comprising the amino acid sequence of SEQ ID NO: 914, e. CDR-L2 comprising the amino acid sequence of SEQ ID NO: 1456, and f. CDR-L3 comprising the amino acid sequence of SEQ ID NO: 1998.

[1635] In one aspect, the present disclosure provides an antibody or antigen-binding fragment thereof comprising a CDR-H3 comprising the amino acid sequence of SEQ ID NO: 1727, and a CDR-L3 comprising the amino acid sequence of SEQ ID NO: 1998.

[1636] In one aspect, the present disclosure provides an antibody or antigen-binding fragment thereof comprising at least one, at least two, or all three VH CDR sequences selected from: a. CDR-H1 comprising the amino acid sequence of SEQ ID NO: 643, b. CDR-H2 comprising the amino acid sequence of SEQ ID NO: 1185, c. CDR-H3 comprising the amino acid sequence of SEQ ID NO: 1727, and a VL comprising the amino acid sequence of SEQ ID NO: 372.

[1637] In one aspect, the present disclosure provides an antibody or antigen-binding fragment thereof comprising at least one, at least two, or all three VL CDR sequences selected from: a. CDR-L1 comprising the amino acid sequence of SEQ ID NO: 914, b. CDR-L2 comprising the amino acid sequence of SEQ ID NO: 1456, c. CDR-L3 comprising the amino acid sequence of SEQ ID NO: 1998, and a VH comprising the amino acid sequence of SEQ ID NO: 101.

[1638] In one aspect, an antibody or antigen-binding fragment thereof is provided, wherein the antibody or antigen-binding fragment thereof comprises a heavy chain variable domain (VH) having at least 90%, 91%, 92%, 93%, 94%, 95%, 96%, 97%, 98%, 99%, or 100% sequence identity to the amino acid sequence SEQ ID NO: 101. In some embodiments, a VH sequence having at least 90%, 91%, 92%, 93%, 94%, 95%, 96%, 97%, 98%, or 99% identity contains substitutions (e.g., conservative substitutions), insertions, or deletions relative to the reference sequence, but an antibody or antigen-binding fragment thereof comprising that sequence retains the ability to bind to same antigen as of the parent (e.g., cancer associated antigen). In some embodiments, a total of 1 to 10 amino acids have been substituted, inserted and/or deleted in the amino acid sequence SEQ ID NO: 101. In some embodiments, substitutions, insertions, or deletions occur in regions outside the CDRs (e.g., in the FRs). Optionally, the antibody or antigen-binding fragment thereof comprises the VH sequence SEQ ID NO: 101, including one or more post-translational modifications of that sequence. In a particular embodiment, the VH comprises one, two or three CDRs selected from: a. CDR-H1, comprising the amino acid sequence SEQ ID NO: 643, b. CDR-H2, comprising the amino acid sequence SEQ ID NO: 1185, and a CDR-H3, comprising the amino acid sequence SEQ ID NO: 1727.

[1639] In one aspect, an antibody or antigen-binding fragment thereof is provided, wherein the antibody or antigen-binding fragment thereof comprises a light chain variable domain (VL) having at least 90%, 91%, 92%, 93%, 94%, 95%, 96%, 97%, 98%, 99%, or 100% sequence identity to the amino acid sequence SEQ ID NO: 372. In some embodiments, a VL sequence having at least 90%, 91%, 92%, 93%, 94%, 95%, 96%, 97%, 98%, or 99% identity contains substitutions (e.g., conservative substitutions), insertions, or deletions relative to the reference sequence, but an antibody or antigen-binding fragment thereof comprising that sequence retains the ability to bind to same antigen as the parent (e.g., cancer associated antigen). In some embodiments, a total of 1 to 10 amino acids have been substituted, inserted and/or deleted in the amino acid sequence SEQ ID NO: 372. In some embodiments, the substitutions, insertions, or deletions occur in regions outside the CDRs (e.g., in the FRs). Optionally, the antibody or antigen-binding fragment thereof comprises the VL sequence SEQ ID NO: 372, including one or more post-translational modifications of that sequence. In a particular embodiment, the VL comprises one, two or three CDRs selected from: a. CDR-L1, comprising the amino acid sequence SEQ ID NO: 914, b. CDR-L2, comprising the amino acid sequence SEQ ID NO: 1456, and c. CDR-L3, comprising the amino acid sequence SEQ ID NO: 1998.

[1640] In one aspect, an antibody or antigen-binding fragment thereof is provided, wherein the antibody or antigen-binding fragment thereof comprises a VH as in any of the embodiments provided above, and a VL as in any of the embodiments provided above. In some embodiments, the antibody or antigen-binding fragment thereof comprises the VH amino acid sequence of SEQ ID NO: 101, and the VL amino acid sequence of SEQ ID NO: 372, optionally including post-translational modifications of those sequences.

### THNS1007

[1641] In one aspect, the present disclosure provides an antibody or antigen-binding fragment thereof comprising at least one or both variable regions selected from: a. VH comprising the amino acid sequence of SEQ ID NO: 102 and b. VL comprising the amino acid sequence of SEQ ID NO: 373.

[1642] In one aspect, the present disclosure provides an antibody or antigen-binding fragment thereof comprising at least one, two, three, four, five, or six CDRs selected from: a. CDR-H1 comprising the amino acid sequence of SEQ ID NO: 644, b. CDR-H2 comprising the amino acid sequence of SEQ ID NO: 1186, c. CDR-H3 comprising the amino acid sequence of SEQ ID NO: 1728, d. CDR-L1 comprising the amino acid sequence of SEQ ID NO: 915, e. CDR-L2 comprising the amino acid sequence of SEQ ID NO: 1457, and f. CDR-L3 comprising the amino acid sequence of SEQ ID NO: 1999.

[1643] In one aspect, the present disclosure provides an antibody or antigen-binding fragment thereof comprising a CDR-H3 comprising the amino acid sequence of SEQ ID NO: 1728, and a CDR-L3 comprising the amino acid sequence of SEQ ID NO: 1999.

[1644] In one aspect, the present disclosure provides an antibody or antigen-binding fragment thereof comprising at least one, at least two, or all three VH CDR sequences selected from: a. CDR-H1 comprising the amino acid sequence of SEQ ID NO: 644, b. CDR-H2 comprising the amino acid sequence of SEQ ID NO: 1186, c. CDR-H3 comprising the amino acid sequence of SEQ ID NO: 1728, and a VL comprising the amino acid sequence of SEQ ID NO: 373.

[1645] In one aspect, the present disclosure provides an antibody or antigen-binding fragment thereof comprising at least one, at least two, or all three VL CDR sequences selected from: a. CDR-L1 comprising the amino acid sequence of SEQ ID NO: 915, b. CDR-L2 comprising the amino acid sequence of SEQ ID NO: 1457, c. CDR-L3 comprising the amino acid sequence of SEQ ID NO: 1999, and a VH comprising the amino acid sequence of SEQ ID NO: 102.

[1646] In one aspect, an antibody or antigen-binding fragment thereof is provided, wherein the antibody or antigen-binding fragment thereof comprises a heavy chain variable domain (VH) having at least 90%, 91%, 92%, 93%, 94%, 95%, 96%, 97%, 98%, 99%, or 100% sequence identity to the amino acid sequence SEQ ID NO: 102. In some embodiments, a VH sequence having at least 90%, 91%, 92%, 93%, 94%, 95%, 96%, 97%, 98%, or 99% identity contains substitutions (e.g., conservative substitutions), insertions, or deletions relative to the reference sequence, but an antibody or antigen-binding fragment thereof comprising that sequence retains the ability to bind to same antigen as of the parent (e.g., cancer associated antigen). In some embodiments, a total of 1 to 10 amino acids have been substituted, inserted and/or deleted in the amino acid sequence SEQ ID NO: 102. In some embodiments, substitutions, insertions, or deletions occur in regions outside the CDRs (e.g., in the FRs). Optionally, the antibody or antigen-binding fragment thereof comprises the VH sequence SEQ ID NO: 102, including one or more post-translational modifications of that sequence. In a particular embodiment, the VH comprises one, two or three CDRs selected from: a. CDR-H1, comprising the amino acid sequence SEQ ID NO: 644, b. CDR-H2, comprising the amino acid sequence SEQ ID NO: 1186, and c. CDR-H3, comprising the amino acid sequence SEQ ID NO: 1728.

[1647] In one aspect, an antibody or antigen-binding fragment thereof is provided, wherein the antibody or antigen-binding fragment thereof comprises a light chain variable domain (VL) having at least 90%, 91%, 92%, 93%, 94%, 95%, 96%, 97%, 98%, 99%, or 100% sequence identity to the amino acid sequence SEQ ID NO: 373. In some embodiments, a VL sequence having at least 90%, 91%, 92%, 93%, 94%, 95%, 96%, 97%, 98%, or 99% identity contains substitutions (e.g., conservative substitutions), insertions, or deletions relative to the reference sequence, but an antibody or antigen-binding fragment thereof comprising that sequence retains the ability to bind to same antigen as the parent (e.g., cancer associated antigen). In some embodiments, a total of 1 to 10 amino acids have been substituted, inserted and/or deleted in the amino acid sequence SEQ ID NO: 373. In some embodiments, the substitutions, insertions, or deletions occur in regions outside the CDRs (e.g., in the FRs). Optionally, the antibody or antigen-binding fragment thereof comprises the VL sequence SEQ ID NO: 373, including one or more post-translational modifications of that sequence. In a particular embodiment, the VL comprises one, two or three CDRs selected from: a. CDR-L1, comprising the amino acid sequence SEQ ID NO: 915, b. CDR-L2, comprising the amino acid sequence SEQ ID NO: 1457, and c. CDR-L3, comprising the amino acid sequence SEQ ID NO: 1999.

[1648] In one aspect, an antibody or antigen-binding fragment thereof is provided, wherein the antibody or antigen-binding fragment thereof comprises a VH as in any of the embodiments provided above, and a VL as in any of the embodiments provided above. In some embodiments, the antibody or antigen-binding fragment thereof comprises the VH amino acid sequence of SEQ ID NO: 102, and the VL amino acid sequence of SEQ ID NO: 373, optionally including post-translational modifications of those sequences.

### THNS1008

[1649] In one aspect, the present disclosure provides an antibody or antigen-binding fragment thereof comprising at least one or both variable regions selected from: a. VH comprising the amino acid sequence of SEQ ID NO: 103 and b. VL comprising the amino acid sequence of SEQ ID NO: 374.

[1650] In one aspect, the present disclosure provides an antibody or antigen-binding fragment thereof comprising at least one, two, three, four, five, or six CDRs selected from: a. CDR-H1 comprising the amino acid sequence of SEQ ID NO: 645, b. CDR-H2 comprising the amino acid sequence of SEQ ID NO: 1187, c. CDR-H3 comprising the amino acid sequence of SEQ ID NO: 1729, d. CDR-L1 comprising the amino acid sequence of SEQ ID NO: 916, e. CDR-L2 comprising the amino acid sequence of SEQ ID NO: 1458, and f. CDR-L3 comprising the amino acid sequence of SEQ ID NO: 2000.

[1651] In one aspect, the present disclosure provides an antibody or antigen-binding fragment thereof comprising at least one, two, three, four, five, or six CDRs selected from: a. CDR-H1 comprising a CDR-H3 comprising the amino acid sequence of SEQ ID NO: 1729, and a CDR-L3 comprising the amino acid sequence of SEQ ID NO: 2000.

[1652] In one aspect, the present disclosure provides an antibody or antigen-binding fragment thereof comprising at least one, at least two, or all three VH CDR sequences selected from: a. CDR-H1 comprising the amino acid sequence of SEQ ID NO: 645, b. CDR-H2 comprising the amino acid sequence of SEQ ID NO: 1187, c. CDR-H3 comprising the amino acid sequence of SEQ ID NO: 1729, and a VL comprising the amino acid sequence of SEQ ID NO: 374.

[1653] In one aspect, the present disclosure provides an antibody or antigen-binding fragment thereof comprising at least one, at least two, or all three VL CDR sequences selected from: a. CDR-L1 comprising the amino acid sequence of SEQ ID NO: 916, b. CDR-L2 comprising the amino acid sequence of SEQ ID NO: 1458, c. CDR-L3 comprising the amino acid sequence of SEQ ID NO: 2000, and a VH comprising the amino acid sequence of SEQ ID NO: 103.

[1654] In one aspect, an antibody or antigen-binding fragment thereof is provided, wherein the antibody or antigen-binding fragment thereof comprises a heavy chain variable domain (VH) having at least 90%, 91%, 92%, 93%, 94%, 95%, 96%, 97%, 98%, 99%, or 100% sequence identity to the amino acid sequence SEQ ID NO: 103. In some embodiments, a VH sequence having at least 90%, 91%, 92%, 93%, 94%, 95%, 96%, 97%, 98%, or 99% identity contains substitutions (e.g., conservative substitutions), insertions, or deletions relative to the reference sequence, but an antibody or antigen-binding fragment thereof comprising that sequence retains the ability to bind to same antigen as of the parent (e.g., cancer associated antigen). In some embodiments, a total of 1 to 10 amino acids have been substituted, inserted and/or deleted in the amino acid sequence SEQ ID NO: 103. In some embodiments, substitutions, insertions, or deletions occur in regions outside the CDRs (e.g., in the FRs). Optionally, the antibody or antigen-binding fragment thereof comprises the VH sequence SEQ ID NO: 103, including one or more post-translational modifications of that sequence. In a particular embodiment, the VH comprises one, two or three CDRs selected from: a. CDR-H1, comprising the amino acid sequence SEQ ID NO: 645, b. CDR-H2, comprising the amino acid sequence SEQ ID NO: 1187, and c. CDR-H3, comprising the amino acid sequence SEQ ID NO: 1729.

[1655] In one aspect, an antibody or antigen-binding fragment thereof is provided, wherein the antibody or antigen-binding fragment thereof comprises a light chain variable domain (VL) having at least 90%, 91%, 92%, 93%, 94%, 95%, 96%, 97%, 98%, 99%, or 100% sequence identity to the amino acid sequence SEQ ID NO: 374. In some embodiments, a VL sequence having at least 90%, 91%, 92%, 93%, 94%, 95%, 96%, 97%, 98%, or 99% identity contains substitutions (e.g., conservative substitutions), thereof comprising that sequence retains the ability to bind to same antigen as the parent (e.g., cancer associated antigen). In some embodiments, a total of 1 to 10 amino acids have been substituted, inserted and/or deleted in the amino acid sequence SEQ ID NO: 374. In some embodiments, the substitutions, insertions, or deletions occur in regions outside the CDRs (e.g., in the FRs). Optionally, the antibody or antigen-binding fragment thereof comprises the VL sequence SEQ ID NO: 374, including one or more post-translational modifications of that sequence. In a particular embodiment, the VL comprises one, two or three CDRs selected from: a. CDR-L1, comprising the amino acid sequence SEQ ID NO: 916, b. CDR-L2, comprising the amino acid sequence SEQ ID NO: 1458, and c. CDR-L3, comprising the amino acid sequence SEQ ID NO: 2000.

[1656] In one aspect, an antibody or antigen-binding fragment thereof is provided, wherein the antibody or antigen-binding fragment thereof comprises a VH as in any of the embodiments provided above, and a VL as in any of the embodiments provided above. In some embodiments, the antibody or antigen-binding fragment thereof comprises the VH amino acid sequence of SEQ ID NO: 103, and the VL amino acid sequence of SEQ ID NO: 374, optionally including post-translational modifications of those sequences.

### THNS1009

[1657] In one aspect, the present disclosure provides an antibody or antigen-binding fragment thereof comprising at least one or both variable regions selected from: a. VH comprising the amino acid sequence of SEQ ID NO: 104 and b. VL comprising the amino acid sequence of SEQ ID NO: 375.

[1658] In one aspect, the present disclosure provides an antibody or antigen-binding fragment thereof comprising at least one, two, three, four, five, or six CDRs selected from: a. CDR-H1 comprising the amino acid sequence of SEQ ID NO: 646, b. CDR-H2 comprising the amino acid sequence of SEQ ID NO: 1188, c. CDR-H3 comprising the amino acid sequence of SEQ ID NO: 1730, d. CDR-L1 comprising the amino acid sequence of SEQ ID NO: 917, e. CDR-L2 comprising the amino acid sequence of SEQ ID NO: 1459, and f. CDR-L3 comprising the amino acid sequence of SEQ ID NO: 2001.

[1659] In one aspect, the present disclosure provides an antibody or antigen-binding fragment thereof comprising a CDR-H3 comprising the amino acid sequence of SEQ ID NO: 1730, and a CDR-L3 comprising the amino acid sequence of SEQ ID NO: 2001.

[1660] In one aspect, the present disclosure provides an antibody or antigen-binding fragment thereof comprising at least one, at least two, or all three VH CDR sequences selected from: a. CDR-H1 comprising the amino acid sequence of SEQ ID NO: 646, b. CDR-H2 comprising the amino acid sequence of SEQ ID NO: 1188, c. CDR-H3 comprising the amino acid sequence of SEQ ID NO: 1730, and a VL comprising the amino acid sequence of SEQ ID NO: 375.

[1661] In one aspect, the present disclosure provides an antibody or antigen-binding fragment thereof comprising at least one, at least two, or all three VL CDR sequences selected from: a. CDR-L1 comprising the amino acid sequence of SEQ ID NO: 917, b. CDR-L2 comprising the amino acid sequence of SEQ ID NO: 1459, c. CDR-L3 comprising the amino acid sequence of SEQ ID NO: 2001, and a VH comprising the amino acid sequence of SEQ ID NO: 104.

[1662] In one aspect, an antibody or antigen-binding fragment thereof is provided, wherein the antibody or antigen-binding fragment thereof comprises a heavy chain variable domain (VH) having at least 90%, 91%, 92%, 93%, 94%, 95%, 96%, 97%, 98%, 99%, or 100% sequence identity to the amino acid sequence SEQ ID NO: 104. In some embodiments, a VH sequence having at least 90%, 91%, 92%, 93%, 94%, 95%, 96%, 97%, 98%, or 99% identity contains substitutions (e.g., conservative substitutions), insertions, or deletions relative to the reference sequence, but an antibody or antigen-binding fragment thereof comprising that sequence retains the ability to bind to same antigen as of the parent (e.g., cancer associated antigen). In some embodiments, a total of 1 to 10 amino acids have been substituted, inserted and/or deleted in the amino acid sequence SEQ ID NO: 104. In some embodiments, substitutions, insertions, or deletions occur in regions outside the CDRs (e.g., in the FRs). Optionally, the antibody or antigen-binding fragment thereof comprises the VH sequence SEQ ID NO: 104, including one or more post-translational modifications of that sequence. In a particular embodiment, the VH comprises one, two or three CDRs selected from: a. CDR-H1, comprising the amino acid sequence SEQ ID NO: 646, b. CDR-H2, comprising the amino acid sequence SEQ ID NO: 1188, and c. CDR-H3, comprising the amino acid sequence SEQ ID NO: 1730.

[1663] In one aspect, an antibody or antigen-binding fragment thereof is provided, wherein the antibody or antigen-binding fragment thereof comprises a light chain variable domain (VL) having at least 90%, 91%, 92%, 93%, 94%, 95%, 96%, 97%, 98%, 99%, or 100% sequence identity to the amino acid sequence SEQ ID NO: 375. In some embodiments, a VL sequence having at least 90%, 91%, 92%, 93%, 94%, 95%, 96%, 97%, 98%, or 99% identity contains substitutions (e.g., conservative substitutions), insertions, or deletions relative to the reference sequence, but an antibody or antigen-binding fragment thereof comprising that sequence retains the ability to bind to same antigen as the parent (e.g., cancer associated antigen). In some embodiments, a total of 1 to 10 amino acids have been substituted, inserted and/or deleted in the amino acid sequence SEQ ID NO: 375. In some embodiments, the substitutions, insertions, or deletions occur in regions outside the CDRs (e.g., in the FRs). Optionally, the antibody or antigen-binding fragment thereof comprises the VL sequence SEQ ID NO: 375, including one or more post-translational modifications of that sequence. In a particular embodiment, the VL comprises one, two or three CDRs selected from: a. CDR-L1, comprising the amino acid sequence SEQ ID NO: 917, b. CDR-L2, comprising the amino acid sequence SEQ ID NO: 1459, and c. CDR-L3, comprising the amino acid sequence SEQ ID NO: 2001.

[1664] In one aspect, an antibody or antigen-binding fragment thereof is provided, wherein the antibody or antigen-binding fragment thereof comprises a VH as in any of the embodiments provided above, and a VL as in any of the embodiments provided above. In some embodiments, the antibody or antigen-binding fragment thereof comprises the VH amino acid sequence of SEQ ID NO: 104, and the VL amino acid sequence of SEQ ID NO: 375, optionally including post-translational modifications of those sequences.

### THNS1010

[1665] In one aspect, the present disclosure provides an antibody or antigen-binding fragment thereof comprising at least one or both variable regions selected from: a. VH comprising the amino acid sequence of SEQ ID NO: 105 and b. VL comprising the amino acid sequence of SEQ ID NO: 376.

[1666] In one aspect, the present disclosure provides an antibody or antigen-binding fragment thereof comprising at least one, two, three, four, five, or six CDRs selected from: a. CDR-H1 comprising the amino acid sequence of SEQ ID NO: 647, b. CDR-H2 comprising the amino acid sequence of SEQ ID NO: 1189, c. CDR-H3 comprising the amino acid sequence of SEQ ID NO: 1731, d. CDR-L1 comprising the amino acid sequence of SEQ ID NO: 918, e. CDR-L2 comprising the amino acid sequence of SEQ ID NO: 1460, and f. CDR-L3 comprising the amino acid sequence of SEQ ID NO: 2002.

[1667] In one aspect, the present disclosure provides an antibody or antigen-binding fragment thereof comprising a CDR-H3 comprising the amino acid sequence of SEQ ID NO: 1731, and a CDR-L3 comprising the amino acid sequence of SEQ ID NO: 2002.

[1668] In one aspect, the present disclosure provides an antibody or antigen-binding fragment thereof comprising at least one, at least two, or all three VH CDR sequences selected from: a. CDR-H1 comprising the amino acid sequence of SEQ ID NO: 647, b. CDR-H2 comprising the amino acid sequence of SEQ ID NO: 1189, c. CDR-H3 comprising the amino acid sequence of SEQ ID NO: 1731, and a VL comprising the amino acid sequence of SEQ ID NO: 376.

[1669] In one aspect, the present disclosure provides an antibody or antigen-binding fragment thereof comprising at least one, at least two, or all three VL CDR sequences selected from: a. CDR-L1 comprising the amino acid sequence of SEQ ID NO: 918, b. CDR-L2 comprising the amino acid sequence of SEQ ID NO: 1460, c. CDR-L3 comprising the amino acid sequence of SEQ ID NO: 2002, and a VH comprising the amino acid sequence of SEQ ID NO: 105.

[1670] In one aspect, an antibody or antigen-binding fragment thereof is provided, wherein the antibody or antigen-binding fragment thereof comprises a heavy chain variable domain (VH) having at least 90%, 91%, 92%, 93%, 94%, 95%, 96%, 97%, 98%, 99%, or 100% sequence identity to the amino acid sequence SEQ ID NO: 105. In some embodiments, a VH sequence having at least 90%, 91%, 92%, 93%, 94%, 95%, 96%, 97%, 98%, or 99% identity contains substitutions (e.g., conservative substitutions), insertions, or deletions relative to the reference sequence, but an antibody or antigen-binding fragment thereof comprising that sequence retains the ability to bind to same antigen as of the parent (e.g., cancer associated antigen). In some embodiments, a total of 1 to 10 amino acids have been substituted, inserted and/or deleted in the amino acid sequence SEQ ID NO: 105. In some embodiments, substitutions, insertions, or deletions occur in regions outside the CDRs (e.g., in the FRs). Optionally, the antibody or antigen-binding fragment thereof comprises the VH sequence SEQ ID NO: 105, including one or more post-translational modifications of that sequence. In a particular embodiment, the VH comprises one, two or three CDRs selected from: a. CDR-H1, comprising the amino acid sequence SEQ ID NO: 647, b. CDR-H2, comprising the amino acid sequence SEQ ID NO: 1189, and c. CDR-H3, comprising the amino acid sequence SEQ ID NO: 1731.

[1671] In one aspect, an antibody or antigen-binding fragment thereof is provided, wherein the antibody or antigen-binding fragment thereof comprises a light chain variable domain (VL) having at least 90%, 91%, 92%, 93%, 94%, 95%, 96%, 97%, 98%, 99%, or 100% sequence identity to the amino acid sequence SEQ ID NO: 376. In some embodiments, a VL sequence having at least 90%, 91%, 92%, 93%, 94%, 95%, 96%, 97%, 98%, or 99% identity contains substitutions (e.g., conservative substitutions), insertions, or deletions relative to the reference sequence, but an antibody or antigen-binding fragment thereof comprising that sequence retains the ability to bind to same antigen as the parent (e.g., cancer associated antigen). In some embodiments, a total of 1 to 10 amino acids have been substituted, inserted and/or deleted in the amino acid sequence SEQ ID NO: 376. In some embodiments, the substitutions, insertions, or deletions occur in regions outside the CDRs (e.g., in the FRs). Optionally, the antibody or antigen-binding fragment thereof comprises the VL sequence SEQ ID NO: 376, including one or more post-translational modifications of that sequence. In a particular embodiment, the VL comprises one, two or three CDRs selected from: a. CDR-L1, comprising the amino acid sequence SEQ ID NO: 918, b. CDR-L2, comprising the amino acid sequence SEQ ID NO: 1460, and c. CDR-L3, comprising the amino acid sequence SEQ ID NO: 2002.

[1672] In one aspect, an antibody or antigen-binding fragment thereof is provided, wherein the antibody or antigen-binding fragment thereof comprises a VH as in any of the embodiments provided above, and a VL as in any of the embodiments provided above. In some embodiments, the antibody or antigen-binding fragment thereof comprises the VH amino acid sequence of SEQ ID NO: 105, and the VL amino acid sequence of SEQ ID NO: 376, optionally including post-translational modifications of those sequences.

### THNS1011

[1673] In one aspect, the present disclosure provides an antibody or antigen-binding fragment thereof comprising at least one or both variable regions selected from: a. VH comprising the amino acid sequence of SEQ ID NO: 106 and b. VL comprising the amino acid sequence of SEQ ID NO: 377.

[1674] In one aspect, the present disclosure provides an antibody or antigen-binding fragment thereof comprising at least one, two, three, four, five, or six CDRs selected from: a. CDR-H1 comprising the amino acid sequence of SEQ ID NO: 648, b. CDR-H2 comprising the amino acid sequence of SEQ ID NO: 1190, c. CDR-H3 comprising the amino acid sequence of SEQ ID NO: 1732, d. CDR-L1 comprising the amino acid sequence of SEQ ID NO: 919, e. CDR-L2 comprising the amino acid sequence of SEQ ID NO: 1461, and f. CDR-L3 comprising the amino acid sequence of SEQ ID NO: 2003.

[1675] In one aspect, the present disclosure provides an antibody or antigen-binding fragment thereof comprising a CDR-H3 comprising the amino acid sequence of SEQ ID NO: 1732, and a CDR-L3 comprising the amino acid sequence of SEQ ID NO: 2003.

[1676] In one aspect, the present disclosure provides an antibody or antigen-binding fragment thereof comprising at least one, at least two, or all three VH CDR sequences selected from: a. CDR-H1 comprising the amino acid sequence of SEQ ID NO: 648, b. CDR-H2 comprising the amino acid sequence of SEQ ID NO: 1190, c. CDR-H3 comprising the amino acid sequence of SEQ ID NO: 1732, and a VL comprising the amino acid sequence of SEQ ID NO: 377.

[1677] In one aspect, the present disclosure provides an antibody or antigen-binding fragment thereof comprising at least one, at least two, or all three VL CDR sequences selected from: a. CDR-L1 comprising the amino acid sequence of SEQ ID NO: 919, b. CDR-L2 comprising the amino acid sequence of SEQ ID NO: 1461, c. CDR-L3 comprising the amino acid sequence of SEQ ID NO: 2003, and a VH comprising the amino acid sequence of SEQ ID NO: 106.

[1678] In one aspect, an antibody or antigen-binding fragment thereof is provided, wherein the antibody or antigen-binding fragment thereof comprises a heavy chain variable domain (VH) having at least 90%, 91%, 92%, 93%, 94%, 95%, 96%, 97%, 98%, 99%, or 100% sequence identity to the amino acid sequence SEQ ID NO: 106. In some embodiments, a VH sequence having at least 90%, 91%, 92%, 93%, 94%, 95%, 96%, 97%, 98%, or 99% identity contains substitutions (e.g., conservative substitutions), insertions, or deletions relative to the reference sequence, but an antibody or antigen-binding fragment thereof comprising that sequence retains the ability to bind to same antigen as of the parent (e.g., cancer associated antigen). In some embodiments, a total of 1 to 10 amino acids have been substituted, inserted and/or deleted in the amino acid sequence SEQ ID NO: 106. In some embodiments, substitutions, insertions, or deletions occur in regions outside the CDRs (e.g., in the FRs). Optionally, the antibody or antigen-binding fragment thereof comprises the VH sequence SEQ ID NO: 106, including one or more post-translational modifications of that sequence. In a particular embodiment, the VH comprises one, two or three CDRs selected from: a. CDR-H1, comprising the amino acid sequence SEQ ID NO: 648, b. CDR-H2, comprising the amino acid sequence SEQ ID NO: 1190, and c. CDR-H3, comprising the amino acid sequence SEQ ID NO: 1732.

[1679] In one aspect, an antibody or antigen-binding fragment thereof is provided, wherein the antibody or antigen-binding fragment thereof comprises a light chain variable domain (VL) having at least 90%, 91%, 92%, 93%, 94%, 95%, 96%, 97%, 98%, 99%, or 100% sequence identity to the amino acid sequence SEQ ID NO: 377. In some embodiments, a VL sequence having at least 90%, 91%, 92%, 93%, 94%, 95%, 96%, 97%, 98%, or 99% identity contains substitutions (e.g., conservative substitutions), insertions, or deletions relative to the reference sequence, but an antibody or antigen-binding fragment thereof comprising that sequence retains the ability to bind to same antigen as the parent (e.g., cancer associated antigen). In some embodiments, a total of 1 to 10 amino acids have been substituted, inserted and/or deleted in the amino acid sequence SEQ ID NO: 377. In some embodiments, the substitutions, insertions, or deletions occur in regions outside the CDRs (e.g., in the FRs). Optionally, the antibody or antigen-binding fragment thereof comprises the VL sequence SEQ ID NO: 377, including one or more post-translational modifications of that sequence. In a particular embodiment, the VL comprises one, two or three CDRs selected from: a. CDR-L1, comprising the amino acid sequence SEQ ID NO: 919, b. CDR-L2, comprising the amino acid sequence SEQ ID NO: 1461, and c. CDR-L3, comprising the amino acid sequence SEQ ID NO: 2003.

[1680] In one aspect, an antibody or antigen-binding fragment thereof is provided, wherein the antibody or antigen-binding fragment thereof comprises a VH as in any of the embodiments provided above, and a VL as in any of the embodiments provided above. In some embodiments, the antibody or antigen-binding fragment thereof comprises the VH amino acid sequence of SEQ ID NO: 106, and the VL amino acid sequence of SEQ ID NO: 377, optionally including post-translational modifications of those sequences.

### THNS1012

[1681] In one aspect, the present disclosure provides an antibody or antigen-binding fragment thereof comprising at least one or both variable regions selected from: a. VH comprising the amino acid sequence of SEQ ID NO: 107 and b. VL comprising the amino acid sequence of SEQ ID NO: 378.

[1682] In one aspect, the present disclosure provides an antibody or antigen-binding fragment thereof comprising at least one, two, three, four, five, or six CDRs selected from: a. CDR-H1 comprising the amino acid sequence of SEQ ID NO: 649, b. CDR-H2 comprising the amino acid sequence of SEQ ID NO: 1191, c. CDR-H3 comprising the amino acid sequence of SEQ ID NO: 1733, d. CDR-L1 comprising the amino acid sequence of SEQ ID NO: 920, e. CDR-L2 comprising the amino acid sequence of SEQ ID NO: 1462, f. CDR-L3 comprising the amino acid sequence of SEQ ID NO: 2004.

[1683] In one aspect, the present disclosure provides an antibody or antigen-binding fragment thereof comprising a CDR-H3 comprising the amino acid sequence of SEQ ID NO: 1733, and a CDR-L3 comprising the amino acid sequence of SEQ ID NO: 2004.

[1684] In one aspect, the present disclosure provides an antibody or antigen-binding fragment thereof comprising at least one, at least two, or all three VH CDR sequences selected from: a. CDR-H1 comprising the amino acid sequence of SEQ ID NO: 649, b. CDR-H2 comprising the amino acid sequence of SEQ ID NO: 1191, c. CDR-H3 comprising the amino acid sequence of SEQ ID NO: 1733, and a VL comprising the amino acid sequence of SEQ ID NO: 378.

[1685] In one aspect, the present disclosure provides an antibody or antigen-binding fragment thereof comprising at least one, at least two, or all three VL CDR sequences selected from: a. CDR-L1 comprising the amino acid sequence of SEQ ID NO: 920, b. CDR-L2 comprising the amino acid sequence of SEQ ID NO: 1462, c. CDR-L3 comprising the amino acid sequence of SEQ ID NO: 2004, and a VH comprising the amino acid sequence of SEQ ID NO: 107.

[1686] In one aspect, an antibody or antigen-binding fragment thereof is provided, wherein the antibody or antigen-binding fragment thereof comprises a heavy chain variable domain (VH) having at least 90%, 91%, 92%, 93%, 94%, 95%, 96%, 97%, 98%, 99%, or 100% sequence identity to the amino acid sequence SEQ ID NO: 107. In some embodiments, a VH sequence having at least 90%, 91%, 92%, 93%, 94%, 95%, 96%, 97%, 98%, or 99% identity contains substitutions (e.g., conservative substitutions), insertions, or deletions relative to the reference sequence, but an antibody or antigen-binding fragment thereof comprising that sequence retains the ability to bind to same antigen as of the parent (e.g., cancer associated antigen). In some embodiments, a total of 1 to 10 amino acids have been substituted, inserted and/or deleted in the amino acid sequence SEQ ID NO: 107. In some embodiments, substitutions, insertions, or deletions occur in regions outside the CDRs (e.g., in the FRs). Optionally, the antibody or antigen-binding fragment thereof comprises the VH sequence SEQ ID NO: 107, including one or more post-translational modifications of that sequence. In a particular embodiment, the VH comprises one, two or three CDRs selected from: a. CDR-H1, comprising the amino acid sequence SEQ ID NO: 649, b. CDR-H2, comprising the amino acid sequence SEQ ID NO: 1191, and c. CDR-H3, comprising the amino acid sequence SEQ ID NO: 1733.

[1687] In one aspect, an antibody or antigen-binding fragment thereof is provided, wherein the antibody or antigen-binding fragment thereof comprises a light chain variable domain (VL) having at least 90%, 91%, 92%, 93%, 94%, 95%, 96%, 97%, 98%, 99%, or 100% sequence identity to the amino acid sequence SEQ ID NO: 378. In some embodiments, a VL sequence having at least 90%, 91%, 92%, 93%, 94%, 95%, 96%, 97%, 98%, or 99% identity contains substitutions (e.g., conservative substitutions), insertions, or deletions relative to the reference sequence, but an antibody or antigen-binding fragment thereof comprising that sequence retains the ability to bind to same antigen as the parent (e.g., cancer associated antigen). In some embodiments, a total of 1 to 10 amino acids have been substituted, inserted and/or deleted in the amino acid sequence SEQ ID NO: 378. In some embodiments, the substitutions, insertions, or deletions occur in regions outside the CDRs (e.g., in the FRs). Optionally, the antibody or antigen-binding fragment thereof comprises the VL sequence SEQ ID NO: 378, including one or more post-translational modifications of that sequence. In a particular embodiment, the VL comprises one, two or three CDRs selected from: a. CDR-L1, comprising the amino acid sequence SEQ ID NO: 920, b. CDR-L2, comprising the amino acid sequence SEQ ID NO: 1462, and c. CDR-L3, comprising the amino acid sequence SEQ ID NO: 2004.

[1688] In one aspect, an antibody or antigen-binding fragment thereof is provided, wherein the antibody or antigen-binding fragment thereof comprises a VH as in any of the embodiments provided above, and a VL as in any of the embodiments provided above. In some embodiments, the antibody or antigen-binding fragment thereof comprises the VH amino acid sequence of SEQ ID NO: 107, and the VL amino acid sequence of SEQ ID NO: 378, optionally including post-translational modifications of those sequences.

### THNS1013

[1689] In one aspect, the present disclosure provides an antibody or antigen-binding fragment thereof comprising at least one or both variable regions selected from: a. VH comprising the amino acid sequence of SEQ ID NO: 108 and b. VL comprising the amino acid sequence of SEQ ID NO: 379.

[1690] In one aspect, the present disclosure provides an antibody or antigen-binding fragment thereof comprising at least one, two, three, four, five, or six CDRs selected from: a. CDR-H1 comprising the amino acid sequence of SEQ ID NO: 650, b. CDR-H2 comprising the amino acid sequence of SEQ ID NO: 1192, c. CDR-H3 comprising the amino acid sequence of SEQ ID NO: 1734, d. CDR-L1 comprising the amino acid sequence of SEQ ID NO: 921, e. CDR-L2 comprising the amino acid sequence of SEQ ID NO: 1463, and f. CDR-L3 comprising the amino acid sequence of SEQ ID NO: 2005.

[1691] In one aspect, the present disclosure provides an antibody or antigen-binding fragment thereof comprising a CDR-H3 comprising the amino acid sequence of SEQ ID NO: 1734, and a CDR-L3 comprising the amino acid sequence of SEQ ID NO: 2005.

[1692] In one aspect, the present disclosure provides an antibody or antigen-binding fragment thereof comprising at least one, at least two, or all three VH CDR sequences selected from: a. CDR-H1 comprising the amino acid sequence of SEQ ID NO: 650, b. CDR-H2 comprising the amino acid sequence of SEQ ID NO: 1192, c. CDR-H3 comprising the amino acid sequence of SEQ ID NO: 1734, and a VL comprising the amino acid sequence of SEQ ID NO: 379.

[1693] In one aspect, the present disclosure provides an antibody or antigen-binding fragment thereof comprising at least one, at least two, or all three VL CDR sequences selected from: a. CDR-L1 comprising the amino acid sequence of SEQ ID NO: 921, b. CDR-L2 comprising the amino acid sequence of SEQ ID NO: 1463, c. CDR-L3 comprising the amino acid sequence of SEQ ID NO: 2005, and a VH comprising the amino acid sequence of SEQ ID NO: 108.

[1694] In one aspect, an antibody or antigen-binding fragment thereof is provided, wherein the antibody or antigen-binding fragment thereof comprises a heavy chain variable domain (VH) having at least 90%, 91%, 92%, 93%, 94%, 95%, 96%, 97%, 98%, 99%, or 100% sequence identity to the amino acid sequence SEQ ID NO: 108. In some embodiments, a VH sequence having at least 90%, 91%, 92%, 93%, 94%, 95%, 96%, 97%, 98%, or 99% identity contains substitutions (e.g., conservative substitutions), insertions, or deletions relative to the reference sequence, but an antibody or antigen-binding fragment thereof comprising that sequence retains the ability to bind to same antigen as of the parent (e.g., cancer associated antigen). In some embodiments, a total of 1 to 10 amino acids have been substituted, inserted and/or deleted in the amino acid sequence SEQ ID NO: 108. In some embodiments, substitutions, insertions, or deletions occur in regions outside the CDRs (e.g., in the FRs). Optionally, the antibody or antigen-binding fragment thereof comprises the VH sequence SEQ ID NO: 108, including one or more post-translational modifications of that sequence. In a particular embodiment, the VH comprises one, two or three CDRs selected from: a. CDR-H1, comprising the amino acid sequence SEQ ID NO: 650, b. CDR-H2, comprising the amino acid sequence SEQ ID NO: 1192, and c. CDR-H3, comprising the amino acid sequence SEQ ID NO: 1734.

[1695] In one aspect, an antibody or antigen-binding fragment thereof is provided, wherein the antibody or antigen-binding fragment thereof comprises a light chain variable domain (VL) having at least 90%, 91%, 92%, 93%, 94%, 95%, 96%, 97%, 98%, 99%, or 100% sequence identity to the amino acid sequence SEQ ID NO: 379. In some embodiments, a VL sequence having at least 90%, 91%, 92%, 93%, 94%, 95%, 96%, 97%, 98%, or 99% identity contains substitutions (e.g., conservative substitutions), insertions, or deletions relative to the reference sequence, but an antibody or antigen-binding fragment thereof comprising that sequence retains the ability to bind to same antigen as the parent (e.g., cancer associated antigen). In some embodiments, a total of 1 to 10 amino acids have been substituted, inserted and/or deleted in the amino acid sequence SEQ ID NO: 379. In some embodiments, the substitutions, insertions, or deletions occur in regions outside the CDRs (e.g., in the FRs). Optionally, the antibody or antigen-binding fragment thereof comprises the VL sequence SEQ ID NO: 379, including one or more post-translational modifications of that sequence. In a particular embodiment, the VL comprises one, two or three CDRs selected from: a. CDR-L1, comprising the amino acid sequence SEQ ID NO: 921, b. CDR-L2, comprising the amino acid sequence SEQ ID NO: 1463, and c. CDR-L3, comprising the amino acid sequence SEQ ID NO: 2005.

[1696] In one aspect, an antibody or antigen-binding fragment thereof is provided, wherein the antibody or antigen-binding fragment thereof comprises a VH as in any of the embodiments provided above, and a VL as in any of the embodiments provided above. In some embodiments, the antibody or antigen-binding fragment thereof comprises the VH amino acid sequence of SEQ ID NO: 108, and the VL amino acid sequence of SEQ ID NO: 379, optionally including post-translational modifications of those sequences.

### THNS1014

[1697] In one aspect, the present disclosure provides an antibody or antigen-binding fragment thereof comprising at least one or both variable regions selected from: a. VH comprising the amino acid sequence of SEQ ID NO: 109 and b. VL comprising the amino acid sequence of SEQ ID NO: 380.

[1698] In one aspect, the present disclosure provides an antibody or antigen-binding fragment thereof comprising at least one, two, three, four, five, or six CDRs selected from: a. CDR-H1 comprising the amino acid sequence of SEQ ID NO: 651, b. CDR-H2 comprising the amino acid sequence of SEQ ID NO: 1193, c. CDR-H3 comprising the amino acid sequence of SEQ ID NO: 1735, d. CDR-L1 comprising the amino acid sequence of SEQ ID NO: 922, e. CDR-L2 comprising the amino acid sequence of SEQ ID NO: 1464, and f. CDR-L3 comprising the amino acid sequence of SEQ ID NO: 2006.

[1699] In one aspect, the present disclosure provides an antibody or antigen-binding fragment thereof comprising a CDR-H3 comprising the amino acid sequence of SEQ ID NO: 1735, and a CDR-L3 comprising the amino acid sequence of SEQ ID NO: 2006.

[1700] In one aspect, the present disclosure provides an antibody or antigen-binding fragment thereof comprising at least one, at least two, or all three VH CDR sequences selected from: a. CDR-H1 comprising the amino acid sequence of SEQ ID NO: 651, b. CDR-H2 comprising the amino acid sequence of SEQ ID NO: 1193, c. CDR-H3 comprising the amino acid sequence of SEQ ID NO: 1735, and a VL comprising the amino acid sequence of SEQ ID NO: 380.

[1701] In one aspect, the present disclosure provides an antibody or antigen-binding fragment thereof comprising at least one, at least two, or all three VL CDR sequences selected from: a. CDR-L1 comprising the amino acid sequence of SEQ ID NO: 922, b. CDR-L2 comprising the amino acid sequence of SEQ ID NO: 1464, c. CDR-L3 comprising the amino acid sequence of SEQ ID NO: 2006, and a VH comprising the amino acid sequence of SEQ ID NO: 109.

[1702] In one aspect, an antibody or antigen-binding fragment thereof is provided, wherein the antibody or antigen-binding fragment thereof comprises a heavy chain variable domain (VH) having at least 90%, 91%, 92%, 93%, 94%, 95%, 96%, 97%, 98%, 99%, or 100% sequence identity to the amino acid sequence SEQ ID NO: 109. In some embodiments, a VH sequence having at least 90%, 91%, 92%, 93%, 94%, 95%, 96%, 97%, 98%, or 99% identity contains substitutions (e.g., conservative substitutions), insertions, or deletions relative to the reference sequence, but an antibody or antigen-binding fragment thereof comprising that sequence retains the ability to bind to same antigen as of the parent (e.g., cancer associated antigen). In some embodiments, a total of 1 to 10 amino acids have been substituted, inserted and/or deleted in the amino acid sequence SEQ ID NO: 109. In some embodiments, substitutions, antigen-binding fragment thereof comprises the VH sequence SEQ ID NO: 109, including one or more post-translational modifications of that sequence. In a particular embodiment, the VH comprises one, two or three CDRs selected from: a. CDR-H1, comprising the amino acid sequence SEQ ID NO: 651, b. CDR-H2, comprising the amino acid sequence SEQ ID NO: 1193, and c. CDR-H3, comprising the amino acid sequence SEQ ID NO: 1735.

[1703] In one aspect, an antibody or antigen-binding fragment thereof is provided, wherein the antibody or antigen-binding fragment thereof comprises a light chain variable domain (VL) having at least 90%, 91%, 92%, 93%, 94%, 95%, 96%, 97%, 98%, 99%, or 100% sequence identity to the amino acid sequence SEQ ID NO: 380. In some embodiments, a VL sequence having at least 90%, 91%, 92%, 93%, 94%, 95%, 96%, 97%, 98%, or 99% identity contains substitutions (e.g., conservative substitutions), insertions, or deletions relative to the reference sequence, but an antibody or antigen-binding fragment thereof comprising that sequence retains the ability to bind to same antigen as the parent (e.g., cancer associated antigen). In some embodiments, a total of 1 to 10 amino acids have been substituted, inserted and/or deleted in the amino acid sequence SEQ ID NO: 380. In some embodiments, the substitutions, insertions, or deletions occur in regions outside the CDRs (e.g., in the FRs). Optionally, the antibody or antigen-binding fragment thereof comprises the VL sequence SEQ ID NO: 380, including one or more post-translational modifications of that sequence. In a particular embodiment, the VL comprises one, two or three CDRs selected from: a. CDR-L1, comprising the amino acid sequence SEQ ID NO: 922, b. CDR-L2, comprising the amino acid sequence SEQ ID NO: 1464, and c. CDR-L3, comprising the amino acid sequence SEQ ID NO: 2006.

[1704] In one aspect, an antibody or antigen-binding fragment thereof is provided, wherein the antibody or antigen-binding fragment thereof comprises a VH as in any of the embodiments provided above, and a VL as in any of the embodiments provided above. In some embodiments, the antibody or antigen-binding fragment thereof comprises the VH amino acid sequence of SEQ ID NO: 109, and the VL amino acid sequence of SEQ ID NO: 380, optionally including post-translational modifications of those sequences.

### TKIC1001

[1705] In one aspect, the present disclosure provides an antibody or antigen-binding fragment thereof comprising at least one or both variable regions selected from: a. VH comprising the amino acid sequence of SEQ ID NO: 110 and b. VL comprising the amino acid sequence of SEQ ID NO: 381.

[1706] In one aspect, the present disclosure provides an antibody or antigen-binding fragment thereof comprising at least one, two, three, four, five, or six CDRs selected from: a. CDR-H1 comprising the amino acid sequence of SEQ ID NO: 652, b. CDR-H2 comprising the amino acid sequence of SEQ ID NO: 1194, c. CDR-H3 comprising the amino acid sequence of SEQ ID NO: 1736, d. CDR-L1 comprising the amino acid sequence of SEQ ID NO: 923, e. CDR-L2 comprising the amino acid sequence of SEQ ID NO: 1465, and f. CDR-L3 comprising the amino acid sequence of SEQ ID NO: 2007.

[1707] In one aspect, the present disclosure provides an antibody or antigen-binding fragment thereof comprising a CDR-H3 comprising the amino acid sequence of SEQ ID NO: 1736, and a CDR-L3 comprising the amino acid sequence of SEQ ID NO: 2007.

[1708] In one aspect, the present disclosure provides an antibody or antigen-binding fragment thereof comprising at least one, at least two, or all three VH CDR sequences selected from: a. CDR-H1 comprising the amino acid sequence of SEQ ID NO: 652, b. CDR-H2 comprising the amino acid sequence of SEQ ID NO: 1194, c. CDR-H3 comprising the amino acid sequence of SEQ ID NO: 1736, and a VL comprising the amino acid sequence of SEQ ID NO: 381.

[1709] In one aspect, the present disclosure provides an antibody or antigen-binding fragment thereof comprising at least one, at least two, or all three VL CDR sequences selected from: a. CDR-L1 comprising the amino acid sequence of SEQ ID NO: 923, b. CDR-L2 comprising the amino acid sequence of SEQ ID NO: 1465, c. CDR-L3 comprising the amino acid sequence of SEQ ID NO: 2007, and a VH comprising the amino acid sequence of SEQ ID NO: 110.

[1710] In one aspect, an antibody or antigen-binding fragment thereof is provided, wherein the antibody or antigen-binding fragment thereof comprises a heavy chain variable domain (VH) having at least 90%, 91%, 92%, 93%, 94%, 95%, 96%, 97%, 98%, 99%, or 100% sequence identity to the amino acid sequence SEQ ID NO: 110. In some embodiments, a VH sequence having at least 90%, 91%, 92%, 93%, 94%, 95%, 96%, 97%, 98%, or 99% identity contains substitutions (e.g., conservative substitutions), insertions, or deletions relative to the reference sequence, but an antibody or antigen-binding fragment thereof comprising that sequence retains the ability to bind to same antigen as of the parent (e.g., cancer associated antigen). In some embodiments, a total of 1 to 10 amino acids have been substituted, inserted and/or deleted in the amino acid sequence SEQ ID NO: 110. In some embodiments, substitutions, insertions, or deletions occur in regions outside the CDRs (e.g., in the FRs). Optionally, the antibody or antigen-binding fragment thereof comprises the VH sequence SEQ ID NO: 110, including one or more post-translational modifications of that sequence. In a particular embodiment, the VH comprises one, two or three CDRs selected from: a. CDR-H1, comprising the amino acid sequence SEQ ID NO: 652, b. CDR-H2, comprising the amino acid sequence SEQ ID NO: 1194, and c. CDR-H3, comprising the amino acid sequence SEQ ID NO: 1736.

[1711] In one aspect, an antibody or antigen-binding fragment thereof is provided, wherein the antibody or antigen-binding fragment thereof comprises a light chain variable domain (VL) having at least 90%, 91%, 92%, 93%, 94%, 95%, 96%, 97%, 98%, 99%, or 100% sequence identity to the amino acid sequence SEQ ID NO: 381. In some embodiments, a VL sequence having at least 90%, 91%, 92%, 93%, 94%, 95%, 96%, 97%, 98%, or 99% identity contains substitutions (e.g., conservative substitutions), insertions, or deletions relative to the reference sequence, but an antibody or antigen-binding fragment thereof comprising that sequence retains the ability to bind to same antigen as the parent (e.g., cancer associated antigen). In some embodiments, a total of 1 to 10 amino acids have been substituted, inserted and/or deleted in the amino acid sequence SEQ ID NO: 381. In some embodiments, the substitutions, insertions, or deletions occur in regions outside the CDRs (e.g., in the FRs). Optionally, the antibody or antigen-binding fragment thereof comprises the VL sequence SEQ ID NO: 381, including one or more post-translational modifications of that sequence. In a particular embodiment, the VL comprises one, two or three CDRs selected from: a. CDR-L1, comprising the amino acid sequence SEQ ID NO: 923, b. CDR-L2, comprising the amino acid sequence SEQ ID NO: 1465, and c. CDR-L3, comprising the amino acid sequence SEQ ID NO: 2007.

[1712] In one aspect, an antibody or antigen-binding fragment thereof is provided, wherein the antibody or antigen-binding fragment thereof comprises a VH as in any of the embodiments provided above, and a VL as in any of the embodiments provided above. In some embodiments, the antibody or antigen-binding fragment thereof comprises the VH amino acid sequence of SEQ ID NO: 110, and the VL amino acid sequence of SEQ ID NO: 381, optionally including post-translational modifications of those sequences.

### TKIC1002

[1713] In one aspect, the present disclosure provides an antibody or antigen-binding fragment thereof comprising at least one or both variable regions selected from: a. VH comprising the amino acid sequence of SEQ ID NO: 111 and b. VL comprising the amino acid sequence of SEQ ID NO: 382.

[1714] In one aspect, the present disclosure provides an antibody or antigen-binding fragment thereof comprising at least one, two, three, four, five, or six CDRs selected from: a. CDR-H1 comprising the amino acid sequence of SEQ ID NO: 653, b. CDR-H2 comprising the amino acid sequence of SEQ ID NO: 1195, c. CDR-H3 comprising the amino acid sequence of SEQ ID NO: 1737, d. CDR-L1 comprising the amino acid sequence of SEQ ID NO: 924, e. CDR-L2 comprising the amino acid sequence of SEQ ID NO: 1466, and f. CDR-L3 comprising the amino acid sequence of SEQ ID NO: 2008.

[1715] In one aspect, the present disclosure provides an antibody or antigen-binding fragment thereof comprising a CDR-H3 comprising the amino acid sequence of SEQ ID NO: 1737, and a CDR-L3 comprising the amino acid sequence of SEQ ID NO: 2008.

[1716] In one aspect, the present disclosure provides an antibody or antigen-binding fragment thereof comprising at least one, at least two, or all three VH CDR sequences selected from: a. CDR-H1 comprising the amino acid sequence of SEQ ID NO: 653, b. CDR-H2 comprising the amino acid sequence of SEQ ID NO: 1195, c. CDR-H3 comprising the amino acid sequence of SEQ ID NO: 1737, and a VL comprising the amino acid sequence of SEQ ID NO: 382.

[1717] In one aspect, the present disclosure provides an antibody or antigen-binding fragment thereof comprising at least one, at least two, or all three VL CDR sequences selected from: a. CDR-L1 comprising the amino acid sequence of SEQ ID NO: 924, b. CDR-L2 comprising the amino acid sequence of SEQ ID NO: 1466, c. CDR-L3 comprising the amino acid sequence of SEQ ID NO: 2008, and a VH comprising the amino acid sequence of SEQ ID NO: 111.

[1718] In one aspect, an antibody or antigen-binding fragment thereof is provided, wherein the antibody or antigen-binding fragment thereof comprises a heavy chain variable domain (VH) having at least 90%, 91%, 92%, 93%, 94%, 95%, 96%, 97%, 98%, 99%, or 100% sequence identity to the amino acid sequence SEQ ID NO: 111. In some embodiments, a VH sequence having at least 90%, 91%, 92%, 93%, 94%, 95%, 96%, 97%, 98%, or 99% identity contains substitutions (e.g., conservative substitutions), insertions, or deletions relative to the reference sequence, but an antibody or antigen-binding fragment thereof comprising that sequence retains the ability to bind to same antigen as of the parent (e.g., cancer associated antigen). In some embodiments, a total of 1 to 10 amino acids have been substituted, inserted and/or deleted in the amino acid sequence SEQ ID NO: 111. In some embodiments, substitutions, insertions, or deletions occur in regions outside the CDRs (e.g., in the FRs). Optionally, the antibody or antigen-binding fragment thereof comprises the VH sequence SEQ ID NO: 111, including one or more post-translational modifications of that sequence. In a particular embodiment, the VH comprises one, two or three CDRs selected from: a. CDR-H1, comprising the amino acid sequence SEQ ID NO: 653, b. CDR-H2, comprising the amino acid sequence SEQ ID NO: 1195, and c. CDR-H3, comprising the amino acid sequence SEQ ID NO: 1737.

[1719] In one aspect, an antibody or antigen-binding fragment thereof is provided, wherein the antibody or antigen-binding fragment thereof comprises a light chain variable domain (VL) having at least 90%, 91%, 92%, 93%, 94%, 95%, 96%, 97%, 98%, 99%, or 100% sequence identity to the amino acid sequence SEQ ID NO: 382. In some embodiments, a VL sequence having at least 90%, 91%, 92%, 93%, 94%, 95%, 96%, 97%, 98%, or 99% identity contains substitutions (e.g., conservative substitutions), insertions, or deletions relative to the reference sequence, but an antibody or antigen-binding fragment thereof comprising that sequence retains the ability to bind to same antigen as the parent (e.g., cancer associated antigen). In some embodiments, a total of 1 to 10 amino acids have been substituted, inserted and/or deleted in the amino acid sequence SEQ ID NO: 382. In some embodiments, the substitutions, insertions, or deletions occur in regions outside the CDRs (e.g., in the FRs). Optionally, the antibody or antigen-binding fragment thereof comprises the VL sequence SEQ ID NO: 382, including one or more post-translational modifications of that sequence. In a particular embodiment, the VL comprises one, two or three CDRs selected from: a. CDR-L1, comprising the amino acid sequence SEQ ID NO: 924, b. CDR-L2, comprising the amino acid sequence SEQ ID NO: 1466, and c. CDR-L3, comprising the amino acid sequence SEQ ID NO: 2008.

[1720] In one aspect, an antibody or antigen-binding fragment thereof is provided, wherein the antibody or antigen-binding fragment thereof comprises a VH as in any of the embodiments provided above, and a VL as in any of the embodiments provided above. In some embodiments, the antibody or antigen-binding fragment thereof comprises the VH amino acid sequence of SEQ ID NO: 111, and the VL amino acid sequence of SEQ ID NO: 382, optionally including post-translational modifications of those sequences.

### TKIC1003

[1721] In one aspect, the present disclosure provides an antibody or antigen-binding fragment thereof comprising at least one or both variable regions selected from: a. VH comprising the amino acid sequence of SEQ ID NO: 112 and b. VL comprising the amino acid sequence of SEQ ID NO: 383.

[1722] In one aspect, the present disclosure provides an antibody or antigen-binding fragment thereof comprising at least one, two, three, four, five, or six CDRs selected from: a. CDR-H1 comprising the amino acid sequence of SEQ ID NO: 654, b. CDR-H2 comprising the amino acid sequence of SEQ ID NO: 1196, c. CDR-H3 comprising the amino acid sequence of SEQ ID NO: 1738, d. CDR-L1 comprising the amino acid sequence of SEQ ID NO: 925, e. CDR-L2 comprising the amino acid sequence of SEQ ID NO: 1467, and f. CDR-L3 comprising the amino acid sequence of SEQ ID NO: 2009.

[1723] In one aspect, the present disclosure provides an antibody or antigen-binding fragment thereof comprising a CDR-H3 comprising the amino acid sequence of SEQ ID NO: 1738, and a CDR-L3 comprising the amino acid sequence of SEQ ID NO: 2009.

[1724] In one aspect, the present disclosure provides an antibody or antigen-binding fragment thereof comprising at least one, at least two, or all three VH CDR sequences selected from: a. CDR-H1 comprising the amino acid sequence of SEQ ID NO: 654, b. CDR-H2 comprising the amino acid sequence of SEQ ID NO: 1196, c. CDR-H3 comprising the amino acid sequence of SEQ ID NO: 1738, and a VL comprising the amino acid sequence of SEQ ID NO: 383.

[1725] In one aspect, the present disclosure provides an antibody or antigen-binding fragment thereof comprising at least one, at least two, or all three VL CDR sequences selected from: a. CDR-L1 comprising the amino acid sequence of SEQ ID NO: 925, b. CDR-L2 comprising the amino acid sequence of SEQ ID NO: 1467, c. CDR-L3 comprising the amino acid sequence of SEQ ID NO: 2009, and a VH comprising the amino acid sequence of SEQ ID NO: 112.

[1726] In one aspect, an antibody or antigen-binding fragment thereof is provided, wherein the antibody or antigen-binding fragment thereof comprises a heavy chain variable domain (VH) having at least 90%, 91%, 92%, 93%, 94%, 95%, 96%, 97%, 98%, 99%, or 100% sequence identity to the amino acid sequence SEQ ID NO: 112. In some embodiments, a VH sequence having at least 90%, 91%, 92%, 93%, 94%, 95%, 96%, 97%, 98%, or 99% identity contains substitutions (e.g., conservative substitutions), insertions, or deletions relative to the reference sequence, but an antibody or antigen-binding fragment thereof comprising that sequence retains the ability to bind to same antigen as of the parent (e.g., cancer associated antigen). In some embodiments, a total of 1 to 10 amino acids have been substituted, inserted and/or deleted in the amino acid sequence SEQ ID NO: 112. In some embodiments, substitutions, insertions, or deletions occur in regions outside the CDRs (e.g., in the FRs). Optionally, the antibody or antigen-binding fragment thereof comprises the VH sequence SEQ ID NO: 112, including one or more post-translational modifications of that sequence. In a particular embodiment, the VH comprises one, two or three CDRs selected from: a. CDR-H1, comprising the amino acid sequence SEQ ID NO: 654, b. CDR-H2, comprising the amino acid sequence SEQ ID NO: 1196, and c. CDR-H3, comprising the amino acid sequence SEQ ID NO: 1738.

[1727] In one aspect, an antibody or antigen-binding fragment thereof is provided, wherein the antibody or antigen-binding fragment thereof comprises a light chain variable domain (VL) having at least 90%, 91%, 92%, 93%, 94%, 95%, 96%, 97%, 98%, 99%, or 100% sequence identity to the amino acid sequence SEQ ID NO: 383. In some embodiments, a VL sequence having at least 90%, 91%, 92%, 93%, 94%, 95%, 96%, 97%, 98%, or 99% identity contains substitutions (e.g., conservative substitutions), insertions, or deletions relative to the reference sequence, but an antibody or antigen-binding fragment thereof comprising that sequence retains the ability to bind to same antigen as the parent (e.g., cancer associated antigen). In some embodiments, a total of 1 to 10 amino acids have been substituted, inserted and/or deleted in the amino acid sequence SEQ ID NO: 383. In some embodiments, the substitutions, antigen-binding fragment thereof comprises the VL sequence SEQ ID NO: 383, including one or more post-translational modifications of that sequence. In a particular embodiment, the VL comprises one, two or three CDRs selected from: a. CDR-L1, comprising the amino acid sequence SEQ ID NO: 925, b. CDR-L2, comprising the amino acid sequence SEQ ID NO: 1467, and c. CDR-L3, comprising the amino acid sequence SEQ ID NO: 2009.

[1728] In one aspect, an antibody or antigen-binding fragment thereof is provided, wherein the antibody or antigen-binding fragment thereof comprises a VH as in any of the embodiments provided above, and a VL as in any of the embodiments provided above. In some embodiments, the antibody or antigen-binding fragment thereof comprises the VH amino acid sequence of SEQ ID NO: 112, and the VL amino acid sequence of SEQ ID NO: 383, optionally including post-translational modifications of those sequences.

### TKIC1004

[1729] In one aspect, the present disclosure provides an antibody or antigen-binding fragment thereof comprising at least one or both variable regions selected from: a. VH comprising the amino acid sequence of SEQ ID NO: 113 and b. VL comprising the amino acid sequence of SEQ ID NO: 384.

[1730] In one aspect, the present disclosure provides an antibody or antigen-binding fragment thereof comprising at least one, two, three, four, five, or six CDRs selected from: a. CDR-H1 comprising the amino acid sequence of SEQ ID NO: 655, b. CDR-H2 comprising the amino acid sequence of SEQ ID NO: 1197, c. CDR-H3 comprising the amino acid sequence of SEQ ID NO: 1739, d. CDR-L1 comprising the amino acid sequence of SEQ ID NO: 926, e. CDR-L2 comprising the amino acid sequence of SEQ ID NO: 1468, and f. CDR-L3 comprising the amino acid sequence of SEQ ID NO: 2010.

[1731] In one aspect, the present disclosure provides an antibody or antigen-binding fragment thereof comprising a CDR-H3 comprising the amino acid sequence of SEQ ID NO: 1739, and a CDR-L3 comprising the amino acid sequence of SEQ ID NO: 2010.

[1732] In one aspect, the present disclosure provides an antibody or antigen-binding fragment thereof comprising at least one, at least two, or all three VH CDR sequences selected from: a. CDR-H1 comprising the amino acid sequence of SEQ ID NO: 655, b. CDR-H2 comprising the amino acid sequence of SEQ ID NO: 1197, c. CDR-H3 comprising the amino acid sequence of SEQ ID NO: 1739, and a VL comprising the amino acid sequence of SEQ ID NO: 384.

[1733] In one aspect, the present disclosure provides an antibody or antigen-binding fragment thereof comprising at least one, at least two, or all three VL CDR sequences selected from: a. CDR-L1 comprising the amino acid sequence of SEQ ID NO: 926, b. CDR-L2 comprising the amino acid sequence of SEQ ID NO: 1468, c. CDR-L3 comprising the amino acid sequence of SEQ ID NO: 2010, and a VH comprising the amino acid sequence of SEQ ID NO: 113.

[1734] In one aspect, an antibody or antigen-binding fragment thereof is provided, wherein the antibody or antigen-binding fragment thereof comprises a heavy chain variable domain (VH) having at least 90%, 91%, 92%, 93%, 94%, 95%, 96%, 97%, 98%, 99%, or 100% sequence identity to the amino acid sequence SEQ ID NO: 113. In some embodiments, a VH sequence having at least 90%, 91%, 92%, 93%, 94%, 95%, 96%, 97%, 98%, or 99% identity contains substitutions (e.g., conservative substitutions), thereof comprising that sequence retains the ability to bind to same antigen as of the parent (e.g., cancer associated antigen). In some embodiments, a total of 1 to 10 amino acids have been substituted, inserted and/or deleted in the amino acid sequence SEQ ID NO: 113. In some embodiments, substitutions, insertions, or deletions occur in regions outside the CDRs (e.g., in the FRs). Optionally, the antibody or antigen-binding fragment thereof comprises the VH sequence SEQ ID NO: 113, including one or more post-translational modifications of that sequence. In a particular embodiment, the VH comprises one, two or three CDRs selected from: a. CDR-H1, comprising the amino acid sequence SEQ ID NO: 655, b. CDR-H2, comprising the amino acid sequence SEQ ID NO: 1197, and c. CDR-H3, comprising the amino acid sequence SEQ ID NO: 1739.

[1735] In one aspect, an antibody or antigen-binding fragment thereof is provided, wherein the antibody or antigen-binding fragment thereof comprises a light chain variable domain (VL) having at least 90%, 91%, 92%, 93%, 94%, 95%, 96%, 97%, 98%, 99%, or 100% sequence identity to the amino acid sequence SEQ ID NO: 384. In some embodiments, a VL sequence having at least 90%, 91%, 92%, 93%, 94%, 95%, 96%, 97%, 98%, or 99% identity contains substitutions (e.g., conservative substitutions), insertions, or deletions relative to the reference sequence, but an antibody or antigen-binding fragment thereof comprising that sequence retains the ability to bind to same antigen as the parent (e.g., cancer associated antigen). In some embodiments, a total of 1 to 10 amino acids have been substituted, inserted and/or deleted in the amino acid sequence SEQ ID NO: 384. In some embodiments, the substitutions, insertions, or deletions occur in regions outside the CDRs (e.g., in the FRs). Optionally, the antibody or antigen-binding fragment thereof comprises the VL sequence SEQ ID NO: 384, including one or more post-translational modifications of that sequence. In a particular embodiment, the VL comprises one, two or three CDRs selected from: a. CDR-L1, comprising the amino acid sequence SEQ ID NO: 926, b. CDR-L2, comprising the amino acid sequence SEQ ID NO: 1468, and c. CDR-L3, comprising the amino acid sequence SEQ ID NO: 2010.

[1736] In one aspect, an antibody or antigen-binding fragment thereof is provided, wherein the antibody or antigen-binding fragment thereof comprises a VH as in any of the embodiments provided above, and a VL as in any of the embodiments provided above. In some embodiments, the antibody or antigen-binding fragment thereof comprises the VH amino acid sequence of SEQ ID NO: 113, and the VL amino acid sequence of SEQ ID NO: 384, optionally including post-translational modifications of those sequences.

### TKIC1005

[1737] In one aspect, the present disclosure provides an antibody or antigen-binding fragment thereof comprising at least one or both variable regions selected from: a. VH comprising the amino acid sequence of SEQ ID NO: 114 and b. VL comprising the amino acid sequence of SEQ ID NO: 385.

[1738] In one aspect, the present disclosure provides an antibody or antigen-binding fragment thereof comprising at least one, two, three, four, five, or six CDRs selected from: a. CDR-H1 comprising the amino acid sequence of SEQ ID NO: 656, b. CDR-H2 comprising the amino acid sequence of SEQ ID NO: 1198, c. CDR-H3 comprising the amino acid sequence of SEQ ID NO: 1740, d. CDR-L1 comprising the amino acid sequence of SEQ ID NO: 927, e. CDR-L2 comprising the amino acid sequence of SEQ ID NO: 1469, and f. CDR-L3 comprising the amino acid sequence of SEQ ID NO: 2011.

[1739] In one aspect, the present disclosure provides an antibody or antigen-binding fragment thereof comprising a CDR-H3 comprising the amino acid sequence of SEQ ID NO: 1740, and a CDR-L3 comprising the amino acid sequence of SEQ ID NO: 2011.

[1740] In one aspect, the present disclosure provides an antibody or antigen-binding fragment thereof comprising at least one, at least two, or all three VH CDR sequences selected from: a. CDR-H1 comprising the amino acid sequence of SEQ ID NO: 656, b. CDR-H2 comprising the amino acid sequence of SEQ ID NO: 1198, c. CDR-H3 comprising the amino acid sequence of SEQ ID NO: 1740, and a VL comprising the amino acid sequence of SEQ ID NO: 385.

[1741] In one aspect, the present disclosure provides an antibody or antigen-binding fragment thereof comprising at least one, at least two, or all three VL CDR sequences selected from: a. CDR-L1 comprising the amino acid sequence of SEQ ID NO: 927, b. CDR-L2 comprising the amino acid sequence of SEQ ID NO: 1469, c. CDR-L3 comprising the amino acid sequence of SEQ ID NO: 2011, and a VH comprising the amino acid sequence of SEQ ID NO: 114.

[1742] In one aspect, an antibody or antigen-binding fragment thereof is provided, wherein the antibody or antigen-binding fragment thereof comprises a heavy chain variable domain (VH) having at least 90%, 91%, 92%, 93%, 94%, 95%, 96%, 97%, 98%, 99%, or 100% sequence identity to the amino acid sequence SEQ ID NO: 114. In some embodiments, a VH sequence having at least 90%, 91%, 92%, 93%, 94%, 95%, 96%, 97%, 98%, or 99% identity contains substitutions (e.g., conservative substitutions), insertions, or deletions relative to the reference sequence, but an antibody or antigen-binding fragment thereof comprising that sequence retains the ability to bind to same antigen as of the parent (e.g., cancer associated antigen). In some embodiments, a total of 1 to 10 amino acids have been substituted, inserted and/or deleted in the amino acid sequence SEQ ID NO: 114. In some embodiments, substitutions, insertions, or deletions occur in regions outside the CDRs (e.g., in the FRs). Optionally, the antibody or antigen-binding fragment thereof comprises the VH sequence SEQ ID NO: 114, including one or more post-translational modifications of that sequence. In a particular embodiment, the VH comprises one, two or three CDRs selected from: a. CDR-H1, comprising the amino acid sequence SEQ ID NO: 656, b. CDR-H2, comprising the amino acid sequence SEQ ID NO: 1198, and c. CDR-H3, comprising the amino acid sequence SEQ ID NO: 1740.

[1743] In one aspect, an antibody or antigen-binding fragment thereof is provided, wherein the antibody or antigen-binding fragment thereof comprises a light chain variable domain (VL) having at least 90%, 91%, 92%, 93%, 94%, 95%, 96%, 97%, 98%, 99%, or 100% sequence identity to the amino acid sequence SEQ ID NO: 385. In some embodiments, a VL sequence having at least 90%, 91%, 92%, 93%, 94%, 95%, 96%, 97%, 98%, or 99% identity contains substitutions (e.g., conservative substitutions), insertions, or deletions relative to the reference sequence, but an antibody or antigen-binding fragment thereof comprising that sequence retains the ability to bind to same antigen as the parent (e.g., cancer associated antigen). In some embodiments, a total of 1 to 10 amino acids have been substituted, inserted and/or deleted in the amino acid sequence SEQ ID NO: 385. In some embodiments, the substitutions, insertions, or deletions occur in regions outside the CDRs (e.g., in the FRs). Optionally, the antibody or antigen-binding fragment thereof comprises the VL sequence SEQ ID NO: 385, including one or more post-translational modifications of that sequence. In a particular embodiment, the VL comprises one, two or three CDRs selected from: a. CDR-L1, comprising the amino acid sequence SEQ ID NO: 927, b. CDR-L2, comprising the amino acid sequence SEQ ID NO: 1469, and c. CDR-L3, comprising the amino acid sequence SEQ ID NO: 2011.

[1744] In one aspect, an antibody or antigen-binding fragment thereof is provided, wherein the antibody or antigen-binding fragment thereof comprises a VH as in any of the embodiments provided above, and a VL as in any of the embodiments provided above. In some embodiments, the antibody or antigen-binding fragment thereof comprises the VH amino acid sequence of SEQ ID NO: 114, and the VL amino acid sequence of SEQ ID NO: 385, optionally including post-translational modifications of those sequences.

### TKIC1006

[1745] In one aspect, the present disclosure provides an antibody or antigen-binding fragment thereof comprising at least one or both variable regions selected from: a. VH comprising the amino acid sequence of SEQ ID NO: 115 and b. VL comprising the amino acid sequence of SEQ ID NO: 386.

[1746] In one aspect, the present disclosure provides an antibody or antigen-binding fragment thereof comprising at least one, two, three, four, five, or six CDRs selected from: a. CDR-H1 comprising the amino acid sequence of SEQ ID NO: 657, b. CDR-H2 comprising the amino acid sequence of SEQ ID NO: 1199, c. CDR-H3 comprising the amino acid sequence of SEQ ID NO: 1741, d. CDR-L1 comprising the amino acid sequence of SEQ ID NO: 928, e. CDR-L2 comprising the amino acid sequence of SEQ ID NO: 1470, and f. CDR-L3 comprising the amino acid sequence of SEQ ID NO: 2012.

[1747] In one aspect, the present disclosure provides an antibody or antigen-binding fragment thereof comprising a CDR-H3 comprising the amino acid sequence of SEQ ID NO: 1741, and a CDR-L3 comprising the amino acid sequence of SEQ ID NO: 2012.

[1748] In one aspect, the present disclosure provides an antibody or antigen-binding fragment thereof comprising at least one, at least two, or all three VH CDR sequences selected from: a. CDR-H1 comprising the amino acid sequence of SEQ ID NO: 657, b. CDR-H2 comprising the amino acid sequence of SEQ ID NO: 1199, c. CDR-H3 comprising the amino acid sequence of SEQ ID NO: 1741, and a VL comprising the amino acid sequence of SEQ ID NO: 386.

[1749] In one aspect, the present disclosure provides an antibody or antigen-binding fragment thereof comprising at least one, at least two, or all three VL CDR sequences selected from: a. CDR-L1 comprising the amino acid sequence of SEQ ID NO: 928, c. CDR-L2 comprising the amino acid sequence of SEQ ID NO: 1470, d. CDR-L3 comprising the amino acid sequence of SEQ ID NO: 2012, and a VH comprising the amino acid sequence of SEQ ID NO: 115.

[1750] In one aspect, an antibody or antigen-binding fragment thereof is provided, wherein the antibody or antigen-binding fragment thereof comprises a heavy chain variable domain (VH) having at least 90%, 91%, 92%, 93%, 94%, 95%, 96%, 97%, 98%, 99%, or 100% sequence identity to the amino acid sequence SEQ ID NO: 115. In some embodiments, a VH sequence having at least 90%, 91%, 92%, 93%, 94%, 95%, 96%, 97%, 98%, or 99% identity contains substitutions (e.g., conservative substitutions), insertions, or deletions relative to the reference sequence, but an antibody or antigen-binding fragment thereof comprising that sequence retains the ability to bind to same antigen as of the parent (e.g., cancer associated antigen). In some embodiments, a total of 1 to 10 amino acids have been substituted, inserted and/or deleted in the amino acid sequence SEQ ID NO: 115. In some embodiments, substitutions, insertions, or deletions occur in regions outside the CDRs (e.g., in the FRs). Optionally, the antibody or antigen-binding fragment thereof comprises the VH sequence SEQ ID NO: 115, including one or more post-translational modifications of that sequence. In a particular embodiment, the VH comprises one, two or three CDRs selected from: a. CDR-H1, comprising the amino acid sequence SEQ ID NO: 657, b. CDR-H2, comprising the amino acid sequence SEQ ID NO: 1199, and c. CDR-H3, comprising the amino acid sequence SEQ ID NO: 1741.

[1751] In one aspect, an antibody or antigen-binding fragment thereof is provided, wherein the antibody or antigen-binding fragment thereof comprises a light chain variable domain (VL) having at least 90%, 91%, 92%, 93%, 94%, 95%, 96%, 97%, 98%, 99%, or 100% sequence identity to the amino acid sequence SEQ ID NO: 386. In some embodiments, a VL sequence having at least 90%, 91%, 92%, 93%, 94%, 95%, 96%, 97%, 98%, or 99% identity contains substitutions (e.g., conservative substitutions), insertions, or deletions relative to the reference sequence, but an antibody or antigen-binding fragment thereof comprising that sequence retains the ability to bind to same antigen as the parent (e.g., cancer associated antigen). In some embodiments, a total of 1 to 10 amino acids have been substituted, inserted and/or deleted in the amino acid sequence SEQ ID NO: 386. In some embodiments, the substitutions, insertions, or deletions occur in regions outside the CDRs (e.g., in the FRs). Optionally, the antibody or antigen-binding fragment thereof comprises the VL sequence SEQ ID NO: 386, including one or more post-translational modifications of that sequence. In a particular embodiment, the VL comprises one, two or three CDRs selected from: a. CDR-L1, comprising the amino acid sequence SEQ ID NO: 928, b. CDR-L2, comprising the amino acid sequence SEQ ID NO: 1470, and c. CDR-L3, comprising the amino acid sequence SEQ ID NO: 2012.

[1752] In one aspect, an antibody or antigen-binding fragment thereof is provided, wherein the antibody or antigen-binding fragment thereof comprises a VH as in any of the embodiments provided above, and a VL as in any of the embodiments provided above. In some embodiments, the antibody or antigen-binding fragment thereof comprises the VH amino acid sequence of SEQ ID NO: 115, and the VL amino acid sequence of SEQ ID NO: 386, optionally including post-translational modifications of those sequences.

### TKIC1007

[1753] In one aspect, the present disclosure provides an antibody or antigen-binding fragment thereof comprising at least one or both variable regions selected from: a. VH comprising the amino acid sequence of SEQ ID NO: 116 and b. VL comprising the amino acid sequence of SEQ ID NO: 387.

[1754] In one aspect, the present disclosure provides an antibody or antigen-binding fragment thereof comprising at least one, two, three, four, five, or six CDRs selected from: a. CDR-H1 comprising the amino acid sequence of SEQ ID NO: 658, b. CDR-H2 comprising the amino acid sequence of SEQ ID NO: 1200, c. CDR-H3 comprising the amino acid sequence of SEQ ID NO: 1742, d. CDR-L1 comprising the amino acid sequence of SEQ ID NO: 929, e. CDR-L2 comprising the amino acid sequence of SEQ ID NO: 1471, and f. CDR-L3 comprising the amino acid sequence of SEQ ID NO: 2013.

[1755] In one aspect, the present disclosure provides an antibody or antigen-binding fragment thereof comprising a CDR-H3 comprising the amino acid sequence of SEQ ID NO: 1742 and a CDR-L3 comprising the amino acid sequence of SEQ ID NO: 2013.

[1756] In one aspect, the present disclosure provides an antibody or antigen-binding fragment thereof comprising at least one, at least two, or all three VH CDR sequences selected from: a. CDR-H1 comprising the amino acid sequence of SEQ ID NO: 658, b. CDR-H2 comprising the amino acid sequence of SEQ ID NO: 1200, c. CDR-H3 comprising the amino acid sequence of SEQ ID NO: 1742, and a VL comprising the amino acid sequence of SEQ ID NO: 387.

[1757] In one aspect, the present disclosure provides an antibody or antigen-binding fragment thereof comprising at least one, at least two, or all three VL CDR sequences selected from: a. CDR-L1 comprising the amino acid sequence of SEQ ID NO: 929, b. CDR-L2 comprising the amino acid sequence of SEQ ID NO: 1471, c. CDR-L3 comprising the amino acid sequence of SEQ ID NO: 2013, and a VH comprising the amino acid sequence of SEQ ID NO: 116.

[1758] In one aspect, an antibody or antigen-binding fragment thereof is provided, wherein the antibody or antigen-binding fragment thereof comprises a heavy chain variable domain (VH) having at least 90%, 91%, 92%, 93%, 94%, 95%, 96%, 97%, 98%, 99%, or 100% sequence identity to the amino acid sequence SEQ ID NO: 116. In some embodiments, a VH sequence having at least 90%, 91%, 92%, 93%, 94%, 95%, 96%, 97%, 98%, or 99% identity contains substitutions (e.g., conservative substitutions), insertions, or deletions relative to the reference sequence, but an antibody or antigen-binding fragment thereof comprising that sequence retains the ability to bind to same antigen as of the parent (e.g., cancer associated antigen). In some embodiments, a total of 1 to 10 amino acids have been substituted, inserted and/or deleted in the amino acid sequence SEQ ID NO: 116. In some embodiments, substitutions, insertions, or deletions occur in regions outside the CDRs (e.g., in the FRs). Optionally, the antibody or antigen-binding fragment thereof comprises the VH sequence SEQ ID NO: 116, including one or more post-translational modifications of that sequence. In a particular embodiment, the VH comprises one, two or three CDRs selected from: a. CDR-H1, comprising the amino acid sequence SEQ ID NO: 658, b. CDR-H2, comprising the amino acid sequence SEQ ID NO: 1200, and c. CDR-H3, comprising the amino acid sequence SEQ ID NO: 1742.

[1759] In one aspect, an antibody or antigen-binding fragment thereof is provided, wherein the antibody or antigen-binding fragment thereof comprises a light chain variable domain (VL) having at least 90%, 91%, 92%, 93%, 94%, 95%, 96%, 97%, 98%, 99%, or 100% sequence identity to the amino acid sequence SEQ ID NO: 387. In some embodiments, a VL sequence having at least 90%, 91%, 92%, 93%, 94%, 95%, 96%, 97%, 98%, or 99% identity contains substitutions (e.g., conservative substitutions), thereof comprising that sequence retains the ability to bind to same antigen as the parent (e.g., cancer associated antigen). In some embodiments, a total of 1 to 10 amino acids have been substituted, inserted and/or deleted in the amino acid sequence SEQ ID NO: 387. In some embodiments, the substitutions, insertions, or deletions occur in regions outside the CDRs (e.g., in the FRs). Optionally, the antibody or antigen-binding fragment thereof comprises the VL sequence SEQ ID NO: 387, including one or more post-translational modifications of that sequence. In a particular embodiment, the VL comprises one, two or three CDRs selected from: a. CDR-L1, comprising the amino acid sequence SEQ ID NO: 929, b. CDR-L2, comprising the amino acid sequence SEQ ID NO: 1471, and c. CDR-L3, comprising the amino acid sequence SEQ ID NO: 2013.

[1760] In one aspect, an antibody or antigen-binding fragment thereof is provided, wherein the antibody or antigen-binding fragment thereof comprises a VH as in any of the embodiments provided above, and a VL as in any of the embodiments provided above. In some embodiments, the antibody or antigen-binding fragment thereof comprises the VH amino acid sequence of SEQ ID NO: 116, and the VL amino acid sequence of SEQ ID NO: 387, optionally including post-translational modifications of those sequences.

### TKIC1008

[1761] In one aspect, the present disclosure provides an antibody or antigen-binding fragment thereof comprising at least one or both variable regions selected from: a. VH comprising the amino acid sequence of SEQ ID NO: 117 and b. VL comprising the amino acid sequence of SEQ ID NO: 388.

[1762] In one aspect, the present disclosure provides an antibody or antigen-binding fragment thereof comprising at least one, two, three, four, five, or six CDRs selected from: a. CDR-H1 comprising the amino acid sequence of SEQ ID NO: 659, b. CDR-H2 comprising the amino acid sequence of SEQ ID NO: 1201, c. CDR-H3 comprising the amino acid sequence of SEQ ID NO: 1743, d. CDR-L1 comprising the amino acid sequence of SEQ ID NO: 930, e. CDR-L2 comprising the amino acid sequence of SEQ ID NO: 1472, and f. CDR-L3 comprising the amino acid sequence of SEQ ID NO: 2014.

[1763] In one aspect, the present disclosure provides an antibody or antigen-binding fragment thereof comprising a CDR-H3 comprising the amino acid sequence of SEQ ID NO: 1743, and a CDR-L3 comprising the amino acid sequence of SEQ ID NO: 2014.

[1764] In one aspect, the present disclosure provides an antibody or antigen-binding fragment thereof comprising at least one, at least two, or all three VH CDR sequences selected from: a. CDR-H1 comprising the amino acid sequence of SEQ ID NO: 659, b. CDR-H2 comprising the amino acid sequence of SEQ ID NO: 1201, c. CDR-H3 comprising the amino acid sequence of SEQ ID NO: 1743, and a VL comprising the amino acid sequence of SEQ ID NO: 388.

[1765] In one aspect, the present disclosure provides an antibody or antigen-binding fragment thereof comprising at least one, at least two, or all three VL CDR sequences selected from: a. CDR-L1 comprising the amino acid sequence of SEQ ID NO: 930, b. CDR-L2 comprising the amino acid sequence of SEQ ID NO: 1472, c. CDR-L3 comprising the amino acid sequence of SEQ ID NO: 2014, and a VH comprising the amino acid sequence of SEQ ID NO: 117.

[1766] In one aspect, an antibody or antigen-binding fragment thereof is provided, wherein the antibody or antigen-binding fragment thereof comprises a heavy chain variable domain (VH) having at least 90%, 91%, 92%, 93%, 94%, 95%, 96%, 97%, 98%, 99%, or 100% sequence identity to the amino acid sequence SEQ ID NO: 117. In some embodiments, a VH sequence having at least 90%, 91%, 92%, 93%, 94%, 95%, 96%, 97%, 98%, or 99% identity contains substitutions (e.g., conservative substitutions), insertions, or deletions relative to the reference sequence, but an antibody or antigen-binding fragment thereof comprising that sequence retains the ability to bind to same antigen as of the parent (e.g., cancer associated antigen). In some embodiments, a total of 1 to 10 amino acids have been substituted, inserted and/or deleted in the amino acid sequence SEQ ID NO: 117. In some embodiments, substitutions, insertions, or deletions occur in regions outside the CDRs (e.g., in the FRs). Optionally, the antibody or antigen-binding fragment thereof comprises the VH sequence SEQ ID NO: 117, including one or more post-translational modifications of that sequence. In a particular embodiment, the VH comprises one, two or three CDRs selected from: a. CDR-H1, comprising the amino acid sequence SEQ ID NO: 659, b. CDR-H2, comprising the amino acid sequence SEQ ID NO: 1201, and c. CDR-H3, comprising the amino acid sequence SEQ ID NO: 1743.

[1767] In one aspect, an antibody or antigen-binding fragment thereof is provided, wherein the antibody or antigen-binding fragment thereof comprises a light chain variable domain (VL) having at least 90%, 91%, 92%, 93%, 94%, 95%, 96%, 97%, 98%, 99%, or 100% sequence identity to the amino acid sequence SEQ ID NO: 388. In some embodiments, a VL sequence having at least 90%, 91%, 92%, 93%, 94%, 95%, 96%, 97%, 98%, or 99% identity contains substitutions (e.g., conservative substitutions), insertions, or deletions relative to the reference sequence, but an antibody or antigen-binding fragment thereof comprising that sequence retains the ability to bind to same antigen as the parent (e.g., cancer associated antigen). In some embodiments, a total of 1 to 10 amino acids have been substituted, inserted and/or deleted in the amino acid sequence SEQ ID NO: 388. In some embodiments, the substitutions, insertions, or deletions occur in regions outside the CDRs (e.g., in the FRs). Optionally, the antibody or antigen-binding fragment thereof comprises the VL sequence SEQ ID NO: 388, including one or more post-translational modifications of that sequence. In a particular embodiment, the VL comprises one, two or three CDRs selected from: a. CDR-L1, comprising the amino acid sequence SEQ ID NO: 930, b. CDR-L2, comprising the amino acid sequence SEQ ID NO: 1472, and c. CDR-L3, comprising the amino acid sequence SEQ ID NO: 2014.

[1768] In one aspect, an antibody or antigen-binding fragment thereof is provided, wherein the antibody or antigen-binding fragment thereof comprises a VH as in any of the embodiments provided above, and a VL as in any of the embodiments provided above. In some embodiments, the antibody or antigen-binding fragment thereof comprises the VH amino acid sequence of SEQ ID NO: 117, and the VL amino acid sequence of SEQ ID NO: 388, optionally including post-translational modifications of those sequences.

### TKIC1009

[1769] In one aspect, the present disclosure provides an antibody or antigen-binding fragment thereof comprising at least one or both variable regions selected from: a. VH comprising the amino acid sequence of SEQ ID NO: 118 and b. VL comprising the amino acid sequence of SEQ ID NO: 389.

[1770] In one aspect, the present disclosure provides an antibody or antigen-binding fragment thereof comprising at least one, two, three, four, five, or six CDRs selected from: a. CDR-H1 comprising the amino acid sequence of SEQ ID NO: 660, b. CDR-H2 comprising the amino acid sequence of SEQ ID NO: 1202, c. CDR-H3 comprising the amino acid sequence of SEQ ID NO: 1744, d. CDR-L1 comprising the amino acid sequence of SEQ ID NO: 931, e. CDR-L2 comprising the amino acid sequence of SEQ ID NO: 1473, and f. CDR-L3 comprising the amino acid sequence of SEQ ID NO: 2015.

[1771] In one aspect, the present disclosure provides an antibody or antigen-binding fragment thereof comprising a CDR-H3 comprising the amino acid sequence of SEQ ID NO: 1744, and a CDR-L3 comprising the amino acid sequence of SEQ ID NO: 2015.

[1772] In one aspect, the present disclosure provides an antibody or antigen-binding fragment thereof comprising at least one, at least two, or all three VH CDR sequences selected from: a. CDR-H1 comprising the amino acid sequence of SEQ ID NO: 660, b. CDR-H2 comprising the amino acid sequence of SEQ ID NO: 1202, c. CDR-H3 comprising the amino acid sequence of SEQ ID NO: 1744, and a VL comprising the amino acid sequence of SEQ ID NO: 389.

[1773] In one aspect, the present disclosure provides an antibody or antigen-binding fragment thereof comprising at least one, at least two, or all three VL CDR sequences selected from: a. CDR-L1 comprising the amino acid sequence of SEQ ID NO: 931, b. CDR-L2 comprising the amino acid sequence of SEQ ID NO: 1473, c. CDR-L3 comprising the amino acid sequence of SEQ ID NO: 2015, and a VH comprising the amino acid sequence of SEQ ID NO: 118.

[1774] In one aspect, an antibody or antigen-binding fragment thereof is provided, wherein the antibody or antigen-binding fragment thereof comprises a heavy chain variable domain (VH) having at least 90%, 91%, 92%, 93%, 94%, 95%, 96%, 97%, 98%, 99%, or 100% sequence identity to the amino acid sequence SEQ ID NO: 118. In some embodiments, a VH sequence having at least 90%, 91%, 92%, 93%, 94%, 95%, 96%, 97%, 98%, or 99% identity contains substitutions (e.g., conservative substitutions), insertions, or deletions relative to the reference sequence, but an antibody or antigen-binding fragment thereof comprising that sequence retains the ability to bind to same antigen as of the parent (e.g., cancer associated antigen). In some embodiments, a total of 1 to 10 amino acids have been substituted, inserted and/or deleted in the amino acid sequence SEQ ID NO: 118. In some embodiments, substitutions, insertions, or deletions occur in regions outside the CDRs (e.g., in the FRs). Optionally, the antibody or antigen-binding fragment thereof comprises the VH sequence SEQ ID NO: 118, including one or more post-translational modifications of that sequence. In a particular embodiment, the VH comprises one, two or three CDRs selected from: a. CDR-H1, comprising the amino acid sequence SEQ ID NO: 660, b. CDR-H2, comprising the amino acid sequence SEQ ID NO: 1202, and c. CDR-H3, comprising the amino acid sequence SEQ ID NO: 1744.

[1775] In one aspect, an antibody or antigen-binding fragment thereof is provided, wherein the antibody or antigen-binding fragment thereof comprises a light chain variable domain (VL) having at least 90%, 91%, 92%, 93%, 94%, 95%, 96%, 97%, 98%, 99%, or 100% sequence identity to the amino acid sequence SEQ ID NO: 389. In some embodiments, a VL sequence having at least 90%, 91%, 92%, 93%, 94%, 95%, 96%, 97%, 98%, or 99% identity contains substitutions (e.g., conservative substitutions), insertions, or deletions relative to the reference sequence, but an antibody or antigen-binding fragment thereof comprising that sequence retains the ability to bind to same antigen as the parent (e.g., cancer associated antigen). In some embodiments, a total of 1 to 10 amino acids have been substituted, inserted and/or deleted in the amino acid sequence SEQ ID NO: 389. In some embodiments, the substitutions, insertions, or deletions occur in regions outside the CDRs (e.g., in the FRs). Optionally, the antibody or antigen-binding fragment thereof comprises the VL sequence SEQ ID NO: 389, including one or more post-translational modifications of that sequence. In a particular embodiment, the VL comprises one, two or three CDRs selected from: a. CDR-L1, comprising the amino acid sequence SEQ ID NO: 931, b. CDR-L2, comprising the amino acid sequence SEQ ID NO: 1473, and c. CDR-L3, comprising the amino acid sequence SEQ ID NO: 2015.

[1776] In one aspect, an antibody or antigen-binding fragment thereof is provided, wherein the antibody or antigen-binding fragment thereof comprises a VH as in any of the embodiments provided above, and a VL as in any of the embodiments provided above. In some embodiments, the antibody or antigen-binding fragment thereof comprises the VH amino acid sequence of SEQ ID NO: 118, and the VL amino acid sequence of SEQ ID NO: 389, optionally including post-translational modifications of those sequences.

### TKIC1010

[1777] In one aspect, the present disclosure provides an antibody or antigen-binding fragment thereof comprising at least one or both variable regions selected from: a. VH comprising the amino acid sequence of SEQ ID NO: 119 and b. VL comprising the amino acid sequence of SEQ ID NO: 390.

[1778] In one aspect, the present disclosure provides an antibody or antigen-binding fragment thereof comprising at least one, two, three, four, five, or six CDRs selected from: a. CDR-H1 comprising the amino acid sequence of SEQ ID NO: 661, b. CDR-H2 comprising the amino acid sequence of SEQ ID NO: 1203, c. CDR-H3 comprising the amino acid sequence of SEQ ID NO: 1745, d. CDR-L1 comprising the amino acid sequence of SEQ ID NO: 932, e. CDR-L2 comprising the amino acid sequence of SEQ ID NO: 1474, and f. CDR-L3 comprising the amino acid sequence of SEQ ID NO: 2016.

[1779] In one aspect, the present disclosure provides an antibody or antigen-binding fragment thereof comprising a CDR-H3 comprising the amino acid sequence of SEQ ID NO: 1745, and a CDR-L3 comprising the amino acid sequence of SEQ ID NO: 2016.

[1780] In one aspect, the present disclosure provides an antibody or antigen-binding fragment thereof comprising at least one, at least two, or all three VH CDR sequences selected from: a. CDR-H1 comprising the amino acid sequence of SEQ ID NO: 661, b. CDR-H2 comprising the amino acid sequence of SEQ ID NO: 1203, c. CDR-H3 comprising the amino acid sequence of SEQ ID NO: 1745, and a VL comprising the amino acid sequence of SEQ ID NO: 390.

[1781] In one aspect, the present disclosure provides an antibody or antigen-binding fragment thereof comprising at least one, at least two, or all three VL CDR sequences selected from: a CDR-L1 comprising the amino acid sequence of SEQ ID NO: 932, b. CDR-L2 comprising the amino acid sequence of SEQ ID NO: 1474, c. CDR-L3 comprising the amino acid sequence of SEQ ID NO: 2016, and d. VH comprising the amino acid sequence of SEQ ID NO: 119.

[1782] In one aspect, an antibody or antigen-binding fragment thereof is provided, wherein the antibody or antigen-binding fragment thereof comprises a heavy chain variable domain (VH) having at least 90%, 91%, 92%, 93%, 94%, 95%, 96%, 97%, 98%, 99%, or 100% sequence identity to the amino acid sequence SEQ ID NO: 119. In some embodiments, a VH sequence having at least 90%, 91%, 92%, 93%, 94%, 95%, 96%, 97%, 98%, or 99% identity contains substitutions (e.g., conservative substitutions), insertions, or deletions relative to the reference sequence, but an antibody or antigen-binding fragment thereof comprising that sequence retains the ability to bind to same antigen as of the parent (e.g., cancer associated antigen). In some embodiments, a total of 1 to 10 amino acids have been substituted, inserted and/or deleted in the amino acid sequence SEQ ID NO: 119. In some embodiments, substitutions, insertions, or deletions occur in regions outside the CDRs (e.g., in the FRs). Optionally, the antibody or antigen-binding fragment thereof comprises the VH sequence SEQ ID NO: 119, including one or more post-translational modifications of that sequence. In a particular embodiment, the VH comprises one, two or three CDRs selected from: a. CDR-H1, comprising the amino acid sequence SEQ ID NO: 661, b. CDR-H2, comprising the amino acid sequence SEQ ID NO: 1203, and c. CDR-H3, comprising the amino acid sequence SEQ ID NO: 1745.

[1783] In one aspect, an antibody or antigen-binding fragment thereof is provided, wherein the antibody or antigen-binding fragment thereof comprises a light chain variable domain (VL) having at least 90%, 91%, 92%, 93%, 94%, 95%, 96%, 97%, 98%, 99%, or 100% sequence identity to the amino acid sequence SEQ ID NO: 390. In some embodiments, a VL sequence having at least 90%, 91%, 92%, 93%, 94%, 95%, 96%, 97%, 98%, or 99% identity contains substitutions (e.g., conservative substitutions), insertions, or deletions relative to the reference sequence, but an antibody or antigen-binding fragment thereof comprising that sequence retains the ability to bind to same antigen as the parent (e.g., cancer associated antigen). In some embodiments, a total of 1 to 10 amino acids have been substituted, inserted and/or deleted in the amino acid sequence SEQ ID NO: 390. In some embodiments, the substitutions, insertions, or deletions occur in regions outside the CDRs (e.g., in the FRs). Optionally, the antibody or antigen-binding fragment thereof comprises the VL sequence SEQ ID NO: 390, including one or more post-translational modifications of that sequence. In a particular embodiment, the VL comprises one, two or three CDRs selected from: a. CDR-L1, comprising the amino acid sequence SEQ ID NO: 932, b. CDR-L2, comprising the amino acid sequence SEQ ID NO: 1474, and c. CDR-L3, comprising the amino acid sequence SEQ ID NO: 2016.

[1784] In one aspect, an antibody or antigen-binding fragment thereof is provided, wherein the antibody or antigen-binding fragment thereof comprises a VH as in any of the embodiments provided above, and a VL as in any of the embodiments provided above. In some embodiments, the antibody or antigen-binding fragment thereof comprises the VH amino acid sequence of SEQ ID NO: 119, and the VL amino acid sequence of SEQ ID NO: 390, optionally including post-translational modifications of those sequences.

### TKIC1011

[1785] In one aspect, the present disclosure provides an antibody or antigen-binding fragment thereof comprising at least one or both variable regions selected from: a. VH comprising the amino acid sequence of SEQ ID NO: 120 and b. VL comprising the amino acid sequence of SEQ ID NO: 391.

[1786] In one aspect, the present disclosure provides an antibody or antigen-binding fragment thereof comprising at least one, two, three, four, five, or six CDRs selected from: a. CDR-H1 comprising the amino acid sequence of SEQ ID NO: 662, b. CDR-H2 comprising the amino acid sequence of SEQ ID NO: 1204, c. CDR-H3 comprising the amino acid sequence of SEQ ID NO: 1746, d. CDR-L1 comprising the amino acid sequence of SEQ ID NO: 933, e. CDR-L2 comprising the amino acid sequence of SEQ ID NO: 1475, and f. CDR-L3 comprising the amino acid sequence of SEQ ID NO: 2017.

[1787] In one aspect, the present disclosure provides an antibody or antigen-binding fragment thereof comprising a CDR-H3 comprising the amino acid sequence of SEQ ID NO: 1746, and a CDR-L3 comprising the amino acid sequence of SEQ ID NO: 2017.

[1788] In one aspect, the present disclosure provides an antibody or antigen-binding fragment thereof comprising at least one, at least two, or all three VH CDR sequences selected from: a. CDR-H1 comprising the amino acid sequence of SEQ ID NO: 662, b. CDR-H2 comprising the amino acid sequence of SEQ ID NO: 1204, c. CDR-H3 comprising the amino acid sequence of SEQ ID NO: 1746, and a VL comprising the amino acid sequence of SEQ ID NO: 391.

[1789] In one aspect, the present disclosure provides an antibody or antigen-binding fragment thereof comprising at least one, at least two, or all three VL CDR sequences selected from: a. CDR-L1 comprising the amino acid sequence of SEQ ID NO: 933, b. CDR-L2 comprising the amino acid sequence of SEQ ID NO: 1475, c. CDR-L3 comprising the amino acid sequence of SEQ ID NO: 2017, and a VH comprising the amino acid sequence of SEQ ID NO: 120.

[1790] In one aspect, an antibody or antigen-binding fragment thereof is provided, wherein the antibody or antigen-binding fragment thereof comprises a heavy chain variable domain (VH) having at least 90%, 91%, 92%, 93%, 94%, 95%, 96%, 97%, 98%, 99%, or 100% sequence identity to the amino acid sequence SEQ ID NO: 120. In some embodiments, a VH sequence having at least 90%, 91%, 92%, 93%, 94%, 95%, 96%, 97%, 98%, or 99% identity contains substitutions (e.g., conservative substitutions), insertions, or deletions relative to the reference sequence, but an antibody or antigen-binding fragment thereof comprising that sequence retains the ability to bind to same antigen as of the parent (e.g., cancer associated antigen). In some embodiments, a total of 1 to 10 amino acids have been substituted, inserted and/or deleted in the amino acid sequence SEQ ID NO: 120. In some embodiments, substitutions, insertions, or deletions occur in regions outside the CDRs (e.g., in the FRs). Optionally, the antibody or antigen-binding fragment thereof comprises the VH sequence SEQ ID NO: 120, including one or more post-translational modifications of that sequence. In a particular embodiment, the VH comprises one, two or three CDRs selected from: a. CDR-H1, comprising the amino acid sequence SEQ ID NO: 662, b. CDR-H2, comprising the amino acid sequence SEQ ID NO: 1204, and c. CDR-H3, comprising the amino acid sequence SEQ ID NO: 1746.

[1791] In one aspect, an antibody or antigen-binding fragment thereof is provided, wherein the antibody or antigen-binding fragment thereof comprises a light chain variable domain (VL) having at least 90%, 91%, 92%, 93%, 94%, 95%, 96%, 97%, 98%, 99%, or 100% sequence identity to the amino acid sequence SEQ ID NO: 391. In some embodiments, a VL sequence having at least 90%, 91%, 92%, 93%, 94%, 95%, 96%, 97%, 98%, or 99% identity contains substitutions (e.g., conservative substitutions), insertions, or deletions relative to the reference sequence, but an antibody or antigen-binding fragment thereof comprising that sequence retains the ability to bind to same antigen as the parent (e.g., cancer associated antigen). In some embodiments, a total of 1 to 10 amino acids have been substituted, inserted and/or deleted in the amino acid sequence SEQ ID NO: 391. In some embodiments, the substitutions, insertions, or deletions occur in regions outside the CDRs (e.g., in the FRs). Optionally, the antibody or antigen-binding fragment thereof comprises the VL sequence SEQ ID NO: 391, including one or more post-translational modifications of that sequence. In a particular embodiment, the VL comprises one, two or three CDRs selected from: a. CDR-L1, comprising the amino acid sequence SEQ ID NO: 933, b. CDR-L2, comprising the amino acid sequence SEQ ID NO: 1475, and c. CDR-L3, comprising the amino acid sequence SEQ ID NO: 2017.

[1792] In one aspect, an antibody or antigen-binding fragment thereof is provided, wherein the antibody or antigen-binding fragment thereof comprises a VH as in any of the embodiments provided above, and a VL as in any of the embodiments provided above. In some embodiments, the antibody or antigen-binding fragment thereof comprises the VH amino acid sequence of SEQ ID NO: 120, and the VL amino acid sequence of SEQ ID NO: 391, optionally including post-translational modifications of those sequences.

### TKIC1012

[1793] In one aspect, the present disclosure provides an antibody or antigen-binding fragment thereof comprising at least one or both variable regions selected from: a. VH comprising the amino acid sequence of SEQ ID NO: 121 and b. VL comprising the amino acid sequence of SEQ ID NO: 392.

[1794] In one aspect, the present disclosure provides an antibody or antigen-binding fragment thereof comprising at least one, two, three, four, five, or six CDRs selected from: a. CDR-H1 comprising the amino acid sequence of SEQ ID NO: 663, b. CDR-H2 comprising the amino acid sequence of SEQ ID NO: 1205, c. CDR-H3 comprising the amino acid sequence of SEQ ID NO: 1747, d. CDR-L1 comprising the amino acid sequence of SEQ ID NO: 934, e. CDR-L2 comprising the amino acid sequence of SEQ ID NO: 1476, and f. CDR-L3 comprising the amino acid sequence of SEQ ID NO: 2018.

[1795] In one aspect, the present disclosure provides an antibody or antigen-binding fragment thereof comprising a CDR-H3 comprising the amino acid sequence of SEQ ID NO: 1747, and a CDR-L3 comprising the amino acid sequence of SEQ ID NO: 2018.

[1796] In one aspect, the present disclosure provides an antibody or antigen-binding fragment thereof comprising at least one, at least two, or all three VH CDR sequences selected from: a. CDR-H1 comprising the amino acid sequence of SEQ ID NO: 663, b. CDR-H2 comprising the amino acid sequence of SEQ ID NO: 1205, c. CDR-H3 comprising the amino acid sequence of SEQ ID NO: 1747, and a VL comprising the amino acid sequence of SEQ ID NO: 392.

[1797] In one aspect, the present disclosure provides an antibody or antigen-binding fragment thereof comprising at least one, at least two, or all three VL CDR sequences selected from: a. CDR-L1 comprising the amino acid sequence of SEQ ID NO: 934, b. CDR-L2 comprising the amino acid sequence of SEQ ID NO: 1476, c. CDR-L3 comprising the amino acid sequence of SEQ ID NO: 2018, and a VH comprising the amino acid sequence of SEQ ID NO: 121.

[1798] In one aspect, an antibody or antigen-binding fragment thereof is provided, wherein the antibody or antigen-binding fragment thereof comprises a heavy chain variable domain (VH) having at least 90%, 91%, 92%, 93%, 94%, 95%, 96%, 97%, 98%, 99%, or 100% sequence identity to the amino acid sequence SEQ ID NO: 121. In some embodiments, a VH sequence having at least 90%, 91%, 92%, 93%, 94%, 95%, 96%, 97%, 98%, or 99% identity contains substitutions (e.g., conservative substitutions), insertions, or deletions relative to the reference sequence, but an antibody or antigen-binding fragment thereof comprising that sequence retains the ability to bind to same antigen as of the parent (e.g., cancer associated antigen). In some embodiments, a total of 1 to 10 amino acids have been substituted, inserted and/or deleted in the amino acid sequence SEQ ID NO: 121. In some embodiments, substitutions, insertions, or deletions occur in regions outside the CDRs (e.g., in the FRs). Optionally, the antibody or antigen-binding fragment thereof comprises the VH sequence SEQ ID NO: 121, including one or more post-translational modifications of that sequence. In a particular embodiment, the VH comprises one, two or three CDRs selected from: a. CDR-H1, comprising the amino acid sequence SEQ ID NO: 663, b. CDR-H2, comprising the amino acid sequence SEQ ID NO: 1205, and c. CDR-H3, comprising the amino acid sequence SEQ ID NO: 1747.

[1799] In one aspect, an antibody or antigen-binding fragment thereof is provided, wherein the antibody or antigen-binding fragment thereof comprises a light chain variable domain (VL) having at least 90%, 91%, 92%, 93%, 94%, 95%, 96%, 97%, 98%, 99%, or 100% sequence identity to the amino acid sequence SEQ ID NO: 392. In some embodiments, a VL sequence having at least 90%, 91%, 92%, 93%, 94%, 95%, 96%, 97%, 98%, or 99% identity contains substitutions (e.g., conservative substitutions), insertions, or deletions relative to the reference sequence, but an antibody or antigen-binding fragment thereof comprising that sequence retains the ability to bind to same antigen as the parent (e.g., cancer associated antigen). In some embodiments, a total of 1 to 10 amino acids have been substituted, inserted and/or deleted in the amino acid sequence SEQ ID NO: 392. In some embodiments, the substitutions, insertions, or deletions occur in regions outside the CDRs (e.g., in the FRs). Optionally, the antibody or antigen-binding fragment thereof comprises the VL sequence SEQ ID NO: 392, including one or more post-translational modifications of that sequence. In a particular embodiment, the VL comprises one, two or three CDRs selected from: a. CDR-L1, comprising the amino acid sequence SEQ ID NO: 934, b. CDR-L2, comprising the amino acid sequence SEQ ID NO: 1476, and c. CDR-L3, comprising the amino acid sequence SEQ ID NO: 2018.

[1800] In one aspect, an antibody or antigen-binding fragment thereof is provided, wherein the antibody or antigen-binding fragment thereof comprises a VH as in any of the embodiments provided above, and a VL as in any of the embodiments provided above. In some embodiments, the antibody or antigen-binding fragment thereof comprises the VH amino acid sequence of SEQ ID NO: 121, and the VL amino acid sequence of SEQ ID NO: 392, optionally including post-translational modifications of those sequences.

### TKIC1013

[1801] In one aspect, the present disclosure provides an antibody or antigen-binding fragment thereof comprising at least one or both variable regions selected from: a. VH comprising the amino acid sequence of SEQ ID NO: 122 and b. VL comprising the amino acid sequence of SEQ ID NO: 393.

[1802] In one aspect, the present disclosure provides an antibody or antigen-binding fragment thereof comprising at least one, two, three, four, five, or six CDRs selected from: a. CDR-H1 comprising the amino acid sequence of SEQ ID NO: 664, b. CDR-H2 comprising the amino acid sequence of SEQ ID NO: 1206, c. CDR-H3 comprising the amino acid sequence of SEQ ID NO: 1748, d. CDR-L1 comprising the amino acid sequence of SEQ ID NO: 935, e. CDR-L2 comprising the amino acid sequence of SEQ ID NO: 1477, and f. CDR-L3 comprising the amino acid sequence of SEQ ID NO: 2019.

[1803] In one aspect, the present disclosure provides an antibody or antigen-binding fragment thereof comprising a CDR-H3 comprising the amino acid sequence of SEQ ID NO: 1748, and a CDR-L3 comprising the amino acid sequence of SEQ ID NO: 2019.

[1804] In one aspect, the present disclosure provides an antibody or antigen-binding fragment thereof comprising at least one, at least two, or all three VH CDR sequences selected from: a. CDR-H1 comprising the amino acid sequence of SEQ ID NO: 664, b. CDR-H2 comprising the amino acid sequence of SEQ ID NO: 1206, c. CDR-H3 comprising the amino acid sequence of SEQ ID NO: 1748, and a VL comprising the amino acid sequence of SEQ ID NO: 393.

[1805] In one aspect, the present disclosure provides an antibody or antigen-binding fragment thereof comprising at least one, at least two, or all three VL CDR sequences selected from: a. CDR-L1 comprising the amino acid sequence of SEQ ID NO: 935, b. CDR-L2 comprising the amino acid sequence of SEQ ID NO: 1477, c. CDR-L3 comprising the amino acid sequence of SEQ ID NO: 2019, and a VH comprising the amino acid sequence of SEQ ID NO: 122.

[1806] In one aspect, an antibody or antigen-binding fragment thereof is provided, wherein the antibody or antigen-binding fragment thereof comprises a heavy chain variable domain (VH) having at least 90%, 91%, 92%, 93%, 94%, 95%, 96%, 97%, 98%, 99%, or 100% sequence identity to the amino acid sequence SEQ ID NO: 122. In some embodiments, a VH sequence having at least 90%, 91%, 92%, 93%, 94%, 95%, 96%, 97%, 98%, or 99% identity contains substitutions (e.g., conservative substitutions), insertions, or deletions relative to the reference sequence, but an antibody or antigen-binding fragment thereof comprising that sequence retains the ability to bind to same antigen as of the parent (e.g., cancer associated antigen). In some embodiments, a total of 1 to 10 amino acids have been substituted, inserted and/or deleted in the amino acid sequence SEQ ID NO: 122. In some embodiments, substitutions, antigen-binding fragment thereof comprises the VH sequence SEQ ID NO: 122, including one or more post-translational modifications of that sequence. In a particular embodiment, the VH comprises one, two or three CDRs selected from: a. CDR-H1, comprising the amino acid sequence SEQ ID NO: 664, b. CDR-H2, comprising the amino acid sequence SEQ ID NO: 1206, and c. CDR-H3, comprising the amino acid sequence SEQ ID NO: 1748.

[1807] In one aspect, an antibody or antigen-binding fragment thereof is provided, wherein the antibody or antigen-binding fragment thereof comprises a light chain variable domain (VL) having at least 90%, 91%, 92%, 93%, 94%, 95%, 96%, 97%, 98%, 99%, or 100% sequence identity to the amino acid sequence SEQ ID NO: 393. In some embodiments, a VL sequence having at least 90%, 91%, 92%, 93%, 94%, 95%, 96%, 97%, 98%, or 99% identity contains substitutions (e.g., conservative substitutions), insertions, or deletions relative to the reference sequence, but an antibody or antigen-binding fragment thereof comprising that sequence retains the ability to bind to same antigen as the parent (e.g., cancer associated antigen). In some embodiments, a total of 1 to 10 amino acids have been substituted, inserted and/or deleted in the amino acid sequence SEQ ID NO: 393. In some embodiments, the substitutions, insertions, or deletions occur in regions outside the CDRs (e.g., in the FRs). Optionally, the antibody or antigen-binding fragment thereof comprises the VL sequence SEQ ID NO: 393, including one or more post-translational modifications of that sequence. In a particular embodiment, the VL comprises one, two or three CDRs selected from: a. CDR-L1, comprising the amino acid sequence SEQ ID NO: 935, b. CDR-L2, comprising the amino acid sequence SEQ ID NO: 1477, and c. CDR-L3, comprising the amino acid sequence SEQ ID NO: 2019.

[1808] In one aspect, an antibody or antigen-binding fragment thereof is provided, wherein the antibody or antigen-binding fragment thereof comprises a VH as in any of the embodiments provided above, and a VL as in any of the embodiments provided above. In some embodiments, the antibody or antigen-binding fragment thereof comprises the VH amino acid sequence of SEQ ID NO: 122, and the VL amino acid sequence of SEQ ID NO: 393, optionally including post-translational modifications of those sequences.

### TKIC1014

[1809] In one aspect, the present disclosure provides an antibody or antigen-binding fragment thereof comprising at least one or both variable regions selected from: a. VH comprising the amino acid sequence of SEQ ID NO: 123 and b. VL comprising the amino acid sequence of SEQ ID NO: 394.

[1810] In one aspect, the present disclosure provides an antibody or antigen-binding fragment thereof comprising at least one, two, three, four, five, or six CDRs selected from: a. CDR-H1 comprising the amino acid sequence of SEQ ID NO: 665, b. CDR-H2 comprising the amino acid sequence of SEQ ID NO: 1207, c. CDR-H3 comprising the amino acid sequence of SEQ ID NO: 1749, d. CDR-L1 comprising the amino acid sequence of SEQ ID NO: 936, e. CDR-L2 comprising the amino acid sequence of SEQ ID NO: 1478, and f. CDR-L3 comprising the amino acid sequence of SEQ ID NO: 2020.

[1811] In one aspect, the present disclosure provides an antibody or antigen-binding fragment thereof comprising a CDR-H3 comprising the amino acid sequence of SEQ ID NO: 1749, and a CDR-L3 comprising the amino acid sequence of SEQ ID NO: 2020.

[1812] In one aspect, the present disclosure provides an antibody or antigen-binding fragment thereof comprising at least one, at least two, or all three VH CDR sequences selected from: a CDR-H1 comprising the amino acid sequence of SEQ ID NO: 665, b. CDR-H2 comprising the amino acid sequence of SEQ ID NO: 1207, c. CDR-H3 comprising the amino acid sequence of SEQ ID NO: 1749, and a VL comprising the amino acid sequence of SEQ ID NO: 394.

[1813] In one aspect, the present disclosure provides an antibody or antigen-binding fragment thereof comprising at least one, at least two, or all three VL CDR sequences selected from: a. CDR-L1 comprising the amino acid sequence of SEQ ID NO: 936, b. CDR-L2 comprising the amino acid sequence of SEQ ID NO: 1478, c. CDR-L3 comprising the amino acid sequence of SEQ ID NO: 2020, and a VH comprising the amino acid sequence of SEQ ID NO: 123.

[1814] In one aspect, an antibody or antigen-binding fragment thereof is provided, wherein the antibody or antigen-binding fragment thereof comprises a heavy chain variable domain (VH) having at least 90%, 91%, 92%, 93%, 94%, 95%, 96%, 97%, 98%, 99%, or 100% sequence identity to the amino acid sequence SEQ ID NO: 123. In some embodiments, a VH sequence having at least 90%, 91%, 92%, 93%, 94%, 95%, 96%, 97%, 98%, or 99% identity contains substitutions (e.g., conservative substitutions), insertions, or deletions relative to the reference sequence, but an antibody or antigen-binding fragment thereof comprising that sequence retains the ability to bind to same antigen as of the parent (e.g., cancer associated antigen). In some embodiments, a total of 1 to 10 amino acids have been substituted, inserted and/or deleted in the amino acid sequence SEQ ID NO: 123. In some embodiments, substitutions, insertions, or deletions occur in regions outside the CDRs (e.g., in the FRs). Optionally, the antibody or antigen-binding fragment thereof comprises the VH sequence SEQ ID NO: 123, including one or more post-translational modifications of that sequence. In a particular embodiment, the VH comprises one, two or three CDRs selected from: a. CDR-H1, comprising the amino acid sequence SEQ ID NO: 665, b. CDR-H2, comprising the amino acid sequence SEQ ID NO: 1207, and c. CDR-H3, comprising the amino acid sequence SEQ ID NO: 1749.

[1815] In one aspect, an antibody or antigen-binding fragment thereof is provided, wherein the antibody or antigen-binding fragment thereof comprises a light chain variable domain (VL) having at least 90%, 91%, 92%, 93%, 94%, 95%, 96%, 97%, 98%, 99%, or 100% sequence identity to the amino acid sequence SEQ ID NO: 394. In some embodiments, a VL sequence having at least 90%, 91%, 92%, 93%, 94%, 95%, 96%, 97%, 98%, or 99% identity contains substitutions (e.g., conservative substitutions), insertions, or deletions relative to the reference sequence, but an antibody or antigen-binding fragment thereof comprising that sequence retains the ability to bind to same antigen as the parent (e.g., cancer associated antigen). In some embodiments, a total of 1 to 10 amino acids have been substituted, inserted and/or deleted in the amino acid sequence SEQ ID NO: 394. In some embodiments, the substitutions, insertions, or deletions occur in regions outside the CDRs (e.g., in the FRs). Optionally, the antibody or antigen-binding fragment thereof comprises the VL sequence SEQ ID NO: 394, including one or more post-translational modifications of that sequence. In a particular embodiment, the VL comprises one, two or three CDRs selected from: a. CDR-L1, comprising the amino acid sequence SEQ ID NO: 936, b. CDR-L2, comprising the amino acid sequence SEQ ID NO: 1478, and c. CDR-L3, comprising the amino acid sequence SEQ ID NO: 2020.

[1816] In one aspect, an antibody or antigen-binding fragment thereof is provided, wherein the antibody or antigen-binding fragment thereof comprises a VH as in any of the embodiments provided above, and a VL as in any of the embodiments provided above. In some embodiments, the antibody or antigen-binding fragment thereof comprises the VH amino acid sequence of SEQ ID NO: 123, and the VL amino acid sequence of SEQ ID NO: 394, optionally including post-translational modifications of those sequences.

### TKIC1015

[1817] In one aspect, the present disclosure provides an antibody or antigen-binding fragment thereof comprising at least one or both variable regions selected from: a. VH comprising the amino acid sequence of SEQ ID NO: 124 and b. VL comprising the amino acid sequence of SEQ ID NO: 395.

[1818] In one aspect, the present disclosure provides an antibody or antigen-binding fragment thereof comprising at least one, two, three, four, five, or six CDRs selected from: a. CDR-H1 comprising the amino acid sequence of SEQ ID NO: 666, b. CDR-H2 comprising the amino acid sequence of SEQ ID NO: 1208, c. CDR-H3 comprising the amino acid sequence of SEQ ID NO: 1750, d. CDR-L1 comprising the amino acid sequence of SEQ ID NO: 937, e. CDR-L2 comprising the amino acid sequence of SEQ ID NO: 1479, and f. CDR-L3 comprising the amino acid sequence of SEQ ID NO: 2021.

[1819] In one aspect, the present disclosure provides an antibody or antigen-binding fragment thereof comprising a CDR-H3 comprising the amino acid sequence of SEQ ID NO: 1750 and a CDR-L3 comprising the amino acid sequence of SEQ ID NO: 2021.

[1820] In one aspect, the present disclosure provides an antibody or antigen-binding fragment thereof comprising at least one, at least two, or all three VH CDR sequences selected from: a. CDR-H1 comprising the amino acid sequence of SEQ ID NO: 666, b. CDR-H2 comprising the amino acid sequence of SEQ ID NO: 1208, c. CDR-H3 comprising the amino acid sequence of SEQ ID NO: 1750, and a VL comprising the amino acid sequence of SEQ ID NO: 395.

[1821] In one aspect, the present disclosure provides an antibody or antigen-binding fragment thereof comprising at least one, at least two, or all three VL CDR sequences selected from: a. CDR-L1 comprising the amino acid sequence of SEQ ID NO: 937, b. CDR-L2 comprising the amino acid sequence of SEQ ID NO: 1479, c. CDR-L3 comprising the amino acid sequence of SEQ ID NO: 2021, and a VH comprising the amino acid sequence of SEQ ID NO: 124.

[1822] In one aspect, an antibody or antigen-binding fragment thereof is provided, wherein the antibody or antigen-binding fragment thereof comprises a heavy chain variable domain (VH) having at least 90%, 91%, 92%, 93%, 94%, 95%, 96%, 97%, 98%, 99%, or 100% sequence identity to the amino acid sequence SEQ ID NO: 124. In some embodiments, a VH sequence having at least 90%, 91%, 92%, 93%, 94%, 95%, 96%, 97%, 98%, or 99% identity contains substitutions (e.g., conservative substitutions), insertions, or deletions relative to the reference sequence, but an antibody or antigen-binding fragment thereof comprising that sequence retains the ability to bind to same antigen as of the parent (e.g., cancer associated antigen). In some embodiments, a total of 1 to 10 amino acids have been substituted, inserted and/or deleted in the amino acid sequence SEQ ID NO: 124. In some embodiments, substitutions, insertions, or deletions occur in regions outside the CDRs (e.g., in the FRs). Optionally, the antibody or antigen-binding fragment thereof comprises the VH sequence SEQ ID NO: 124, including one or more post-translational modifications of that sequence. In a particular embodiment, the VH comprises one, two or three CDRs selected from: a. CDR-H1, comprising the amino acid sequence SEQ ID NO: 666, b. CDR-H2, comprising the amino acid sequence SEQ ID NO: 1208, and c. CDR-H3, comprising the amino acid sequence SEQ ID NO: 1750.

[1823] In one aspect, an antibody or antigen-binding fragment thereof is provided, wherein the antibody or antigen-binding fragment thereof comprises a light chain variable domain (VL) having at least 90%, 91%, 92%, 93%, 94%, 95%, 96%, 97%, 98%, 99%, or 100% sequence identity to the amino acid sequence SEQ ID NO: 395. In some embodiments, a VL sequence having at least 90%, 91%, 92%, 93%, 94%, 95%, 96%, 97%, 98%, or 99% identity contains substitutions (e.g., conservative substitutions), insertions, or deletions relative to the reference sequence, but an antibody or antigen-binding fragment thereof comprising that sequence retains the ability to bind to same antigen as the parent (e.g., cancer associated antigen). In some embodiments, a total of 1 to 10 amino acids have been substituted, inserted and/or deleted in the amino acid sequence SEQ ID NO: 395. In some embodiments, the substitutions, insertions, or deletions occur in regions outside the CDRs (e.g., in the FRs). Optionally, the antibody or antigen-binding fragment thereof comprises the VL sequence SEQ ID NO: 395, including one or more post-translational modifications of that sequence. In a particular embodiment, the VL comprises one, two or three CDRs selected from: a. CDR-L1, comprising the amino acid sequence SEQ ID NO: 937, b. CDR-L2, comprising the amino acid sequence SEQ ID NO: 1479, and c. CDR-L3, comprising the amino acid sequence SEQ ID NO: 2021.

[1824] In one aspect, an antibody or antigen-binding fragment thereof is provided, wherein the antibody or antigen-binding fragment thereof comprises a VH as in any of the embodiments provided above, and a VL as in any of the embodiments provided above. In some embodiments, the antibody or antigen-binding fragment thereof comprises the VH amino acid sequence of SEQ ID NO: 124, and the VL amino acid sequence of SEQ ID NO: 395, optionally including post-translational modifications of those sequences.

### TKIC1016

[1825] In one aspect, the present disclosure provides an antibody or antigen-binding fragment thereof comprising at least one or both variable regions selected from: a. VH comprising the amino acid sequence of SEQ ID NO: 125 and b. VL comprising the amino acid sequence of SEQ ID NO: 396.

[1826] In one aspect, the present disclosure provides an antibody or antigen-binding fragment thereof comprising at least one, two, three, four, five, or six CDRs selected from: a. CDR-H1 comprising the amino acid sequence of SEQ ID NO: 667, b. CDR-H2 comprising the amino acid sequence of SEQ ID NO: 1209, c. CDR-H3 comprising the amino acid sequence of SEQ ID NO: 1751, d. CDR-L1 comprising the amino acid sequence of SEQ ID NO: 938, e. CDR-L2 comprising the amino acid sequence of SEQ ID NO: 1480, and f. CDR-L3 comprising the amino acid sequence of SEQ ID NO: 2022.

[1827] In one aspect, the present disclosure provides an antibody or antigen-binding fragment thereof comprising a CDR-H3 comprising the amino acid sequence of SEQ ID NO: 1751, and a CDR-L3 comprising the amino acid sequence of SEQ ID NO: 2022.

[1828] In one aspect, the present disclosure provides an antibody or antigen-binding fragment thereof comprising at least one, at least two, or all three VH CDR sequences selected from: a. CDR-H1 comprising the amino acid sequence of SEQ ID NO: 667, b. CDR-H2 comprising the amino acid sequence of SEQ ID NO: 1209, c. CDR-H3 comprising the amino acid sequence of SEQ ID NO: 1751, and a VL comprising the amino acid sequence of SEQ ID NO: 396.

[1829] In one aspect, the present disclosure provides an antibody or antigen-binding fragment thereof comprising at least one, at least two, or all three VL CDR sequences selected from: a. CDR-L1 comprising the amino acid sequence of SEQ ID NO: 938, b. CDR-L2 comprising the amino acid sequence of SEQ ID NO: 1480, c. CDR-L3 comprising the amino acid sequence of SEQ ID NO: 2022, and a VH comprising the amino acid sequence of SEQ ID NO: 125.

[1830] In one aspect, an antibody or antigen-binding fragment thereof is provided, wherein the antibody or antigen-binding fragment thereof comprises a heavy chain variable domain (VH) having at least 90%, 91%, 92%, 93%, 94%, 95%, 96%, 97%, 98%, 99%, or 100% sequence identity to the amino acid sequence SEQ ID NO: 125. In some embodiments, a VH sequence having at least 90%, 91%, 92%, 93%, 94%, 95%, 96%, 97%, 98%, or 99% identity contains substitutions (e.g., conservative substitutions), insertions, or deletions relative to the reference sequence, but an antibody or antigen-binding fragment thereof comprising that sequence retains the ability to bind to same antigen as of the parent (e.g., cancer associated antigen). In some embodiments, a total of 1 to 10 amino acids have been substituted, inserted and/or deleted in the amino acid sequence SEQ ID NO: 125. In some embodiments, substitutions, insertions, or deletions occur in regions outside the CDRs (e.g., in the FRs). Optionally, the antibody or antigen-binding fragment thereof comprises the VH sequence SEQ ID NO: 125, including one or more post-translational modifications of that sequence. In a particular embodiment, the VH comprises one, two or three CDRs selected from: a. CDR-H1, comprising the amino acid sequence SEQ ID NO: 667, b. CDR-H2, comprising the amino acid sequence SEQ ID NO: 1209, and c. CDR-H3, comprising the amino acid sequence SEQ ID NO: 1751.

[1831] In one aspect, an antibody or antigen-binding fragment thereof is provided, wherein the antibody or antigen-binding fragment thereof comprises a light chain variable domain (VL) having at least 90%, 91%, 92%, 93%, 94%, 95%, 96%, 97%, 98%, 99%, or 100% sequence identity to the amino acid sequence SEQ ID NO: 396. In some embodiments, a VL sequence having at least 90%, 91%, 92%, 93%, 94%, 95%, 96%, 97%, 98%, or 99% identity contains substitutions (e.g., conservative substitutions), insertions, or deletions relative to the reference sequence, but an antibody or antigen-binding fragment thereof comprising that sequence retains the ability to bind to same antigen as the parent (e.g., cancer associated antigen). In some embodiments, a total of 1 to 10 amino acids have been substituted, inserted and/or deleted in the amino acid sequence SEQ ID NO: 396. In some embodiments, the substitutions, antigen-binding fragment thereof comprises the VL sequence SEQ ID NO: 396, including one or more post-translational modifications of that sequence. In a particular embodiment, the VL comprises one, two or three CDRs selected from: a. CDR-L1, comprising the amino acid sequence SEQ ID NO: 938, b. CDR-L2, comprising the amino acid sequence SEQ ID NO: 1480, and c. CDR-L3, comprising the amino acid sequence SEQ ID NO: 2022.

[1832] In one aspect, an antibody or antigen-binding fragment thereof is provided, wherein the antibody or antigen-binding fragment thereof comprises a VH as in any of the embodiments provided above, and a VL as in any of the embodiments provided above. In some embodiments, the antibody or antigen-binding fragment thereof comprises the VH amino acid sequence of SEQ ID NO: 125, and the VL amino acid sequence of SEQ ID NO: 396, optionally including post-translational modifications of those sequences.

[1833] TKIC1017

[1834] In one aspect, the present disclosure provides an antibody or antigen-binding fragment thereof comprising at least one or both variable regions selected from: a. VH comprising the amino acid sequence of SEQ ID NO: 126 and b. VL comprising the amino acid sequence of SEQ ID NO: 397.

[1835] In one aspect, the present disclosure provides an antibody or antigen-binding fragment thereof comprising at least one, two, three, four, five, or six CDRs selected from: a. CDR-H1 comprising the amino acid sequence of SEQ ID NO: 668, b. CDR-H2 comprising the amino acid sequence of SEQ ID NO: 1210, c. CDR-H3 comprising the amino acid sequence of SEQ ID NO: 1752, d. CDR-L1 comprising the amino acid sequence of SEQ ID NO: 939, e. CDR-L2 comprising the amino acid sequence of SEQ ID NO: 1481, and f. CDR-L3 comprising the amino acid sequence of SEQ ID NO: 2023.

[1836] In one aspect, the present disclosure provides an antibody or antigen-binding fragment thereof comprising a CDR-H3 comprising the amino acid sequence of SEQ ID NO: 1752, and a CDR-L3 comprising the amino acid sequence of SEQ ID NO: 2023.

[1837] In one aspect, the present disclosure provides an antibody or antigen-binding fragment thereof comprising at least one, at least two, or all three VH CDR sequences selected from: a. CDR-H1 comprising the amino acid sequence of SEQ ID NO: 668, b. CDR-H2 comprising the amino acid sequence of SEQ ID NO: 1210, c. CDR-H3 comprising the amino acid sequence of SEQ ID NO: 1752, and a VL comprising the amino acid sequence of SEQ ID NO: 397.

[1838] In one aspect, the present disclosure provides an antibody or antigen-binding fragment thereof comprising at least one, at least two, or all three VL CDR sequences selected from: a. CDR-L1 comprising the amino acid sequence of SEQ ID NO: 939, b. CDR-L2 comprising the amino acid sequence of SEQ ID NO: 1481, c. CDR-L3 comprising the amino acid sequence of SEQ ID NO: 2023, and a VH comprising the amino acid sequence of SEQ ID NO: 126.

[1839] In one aspect, an antibody or antigen-binding fragment thereof is provided, wherein the antibody or antigen-binding fragment thereof comprises a heavy chain variable domain (VH) having at least 90%, 91%, 92%, 93%, 94%, 95%, 96%, 97%, 98%, 99%, or 100% sequence identity to the amino acid sequence SEQ ID NO: 126. In some embodiments, a VH sequence having at least 90%, 91%, 92%, 93%, 94%, 95%, 96%, 97%, 98%, or 99% identity contains substitutions (e.g., conservative substitutions), thereof comprising that sequence retains the ability to bind to same antigen as of the parent (e.g., cancer associated antigen). In some embodiments, a total of 1 to 10 amino acids have been substituted, inserted and/or deleted in the amino acid sequence SEQ ID NO: 126. In some embodiments, substitutions, insertions, or deletions occur in regions outside the CDRs (e.g., in the FRs). Optionally, the antibody or antigen-binding fragment thereof comprises the VH sequence SEQ ID NO: 126, including one or more post-translational modifications of that sequence. In a particular embodiment, the VH comprises one, two or three CDRs selected from: a. CDR-H1, comprising the amino acid sequence SEQ ID NO: 668, b. CDR-H2, comprising the amino acid sequence SEQ ID NO: 1210, and c. CDR-H3, comprising the amino acid sequence SEQ ID NO: 1752.

[1840] In one aspect, an antibody or antigen-binding fragment thereof is provided, wherein the antibody or antigen-binding fragment thereof comprises a light chain variable domain (VL) having at least 90%, 91%, 92%, 93%, 94%, 95%, 96%, 97%, 98%, 99%, or 100% sequence identity to the amino acid sequence SEQ ID NO: 397. In some embodiments, a VL sequence having at least 90%, 91%, 92%, 93%, 94%, 95%, 96%, 97%, 98%, or 99% identity contains substitutions (e.g., conservative substitutions), insertions, or deletions relative to the reference sequence, but an antibody or antigen-binding fragment thereof comprising that sequence retains the ability to bind to same antigen as the parent (e.g., cancer associated antigen). In some embodiments, a total of 1 to 10 amino acids have been substituted, inserted and/or deleted in the amino acid sequence SEQ ID NO: 397. In some embodiments, the substitutions, insertions, or deletions occur in regions outside the CDRs (e.g., in the FRs). Optionally, the antibody or antigen-binding fragment thereof comprises the VL sequence SEQ ID NO: 397, including one or more post-translational modifications of that sequence. In a particular embodiment, the VL comprises one, two or three CDRs selected from: a. CDR-L1, comprising the amino acid sequence SEQ ID NO: 939, b. CDR-L2, comprising the amino acid sequence SEQ ID NO: 1481, and b. CDR-L3, comprising the amino acid sequence SEQ ID NO: 2023.

[1841] In one aspect, an antibody or antigen-binding fragment thereof is provided, wherein the antibody or antigen-binding fragment thereof comprises a VH as in any of the embodiments provided above, and a VL as in any of the embodiments provided above. In some embodiments, the antibody or antigen-binding fragment thereof comprises the VH amino acid sequence of SEQ ID NO: 126, and the VL amino acid sequence of SEQ ID NO: 397, optionally including post-translational modifications of those sequences.

### TKIC1018

[1842] In one aspect, the present disclosure provides an antibody or antigen-binding fragment thereof comprising at least one or both variable regions selected from: a. VH comprising the amino acid sequence of SEQ ID NO: 127 and b. VL comprising the amino acid sequence of SEQ ID NO: 398.

[1843] In one aspect, the present disclosure provides an antibody or antigen-binding fragment thereof comprising at least one, two, three, four, five, or six CDRs selected from: a. CDR-H1 comprising the amino acid sequence of SEQ ID NO: 669, b. CDR-H2 comprising the amino acid sequence of SEQ ID NO: 1211, c. CDR-H3 comprising the amino acid sequence of SEQ ID NO: 1753, d. CDR-L1 comprising the amino acid sequence of SEQ ID NO: 940, e. CDR-L2 comprising the amino acid sequence of SEQ ID NO: 1482, and f. CDR-L3 comprising the amino acid sequence of SEQ ID NO: 2024.

[1844] In one aspect, the present disclosure provides an antibody or antigen-binding fragment thereof comprising a CDR-H3 comprising the amino acid sequence of SEQ ID NO: 1753, and a CDR-L3 comprising the amino acid sequence of SEQ ID NO: 2024.

[1845] In one aspect, the present disclosure provides an antibody or antigen-binding fragment thereof comprising at least one, at least two, or all three VH CDR sequences selected from: a. CDR-H1 comprising the amino acid sequence of SEQ ID NO: 669, b. CDR-H2 comprising the amino acid sequence of SEQ ID NO: 1211, c. CDR-H3 comprising the amino acid sequence of SEQ ID NO: 1753, and a VL comprising the amino acid sequence of SEQ ID NO: 398.

[1846] In one aspect, the present disclosure provides an antibody or antigen-binding fragment thereof comprising at least one, at least two, or all three VL CDR sequences selected from: a. CDR-L1 comprising the amino acid sequence of SEQ ID NO: 940, b. CDR-L2 comprising the amino acid sequence of SEQ ID NO: 1482, c. CDR-L3 comprising the amino acid sequence of SEQ ID NO: 2024, and a VH comprising the amino acid sequence of SEQ ID NO: 127.

[1847] In one aspect, an antibody or antigen-binding fragment thereof is provided, wherein the antibody or antigen-binding fragment thereof comprises a heavy chain variable domain (VH) having at least 90%, 91%, 92%, 93%, 94%, 95%, 96%, 97%, 98%, 99%, or 100% sequence identity to the amino acid sequence SEQ ID NO: 127. In some embodiments, a VH sequence having at least 90%, 91%, 92%, 93%, 94%, 95%, 96%, 97%, 98%, or 99% identity contains substitutions (e.g., conservative substitutions), insertions, or deletions relative to the reference sequence, but an antibody or antigen-binding fragment thereof comprising that sequence retains the ability to bind to same antigen as of the parent (e.g., cancer associated antigen). In some embodiments, a total of 1 to 10 amino acids have been substituted, inserted and/or deleted in the amino acid sequence SEQ ID NO: 127. In some embodiments, substitutions, insertions, or deletions occur in regions outside the CDRs (e.g., in the FRs). Optionally, the antibody or antigen-binding fragment thereof comprises the VH sequence SEQ ID NO: 127, including one or more post-translational modifications of that sequence. In a particular embodiment, the VH comprises one, two or three CDRs selected from: a. CDR-H1, comprising the amino acid sequence SEQ ID NO: 669, b. CDR-H2, comprising the amino acid sequence SEQ ID NO: 1211, and c. CDR-H3, comprising the amino acid sequence SEQ ID NO: 1753.

[1848] In one aspect, an antibody or antigen-binding fragment thereof is provided, wherein the antibody or antigen-binding fragment thereof comprises a light chain variable domain (VL) having at least 90%, 91%, 92%, 93%, 94%, 95%, 96%, 97%, 98%, 99%, or 100% sequence identity to the amino acid sequence SEQ ID NO: 398. In some embodiments, a VL sequence having at least 90%, 91%, 92%, 93%, 94%, 95%, 96%, 97%, 98%, or 99% identity contains substitutions (e.g., conservative substitutions), insertions, or deletions relative to the reference sequence, but an antibody or antigen-binding fragment thereof comprising that sequence retains the ability to bind to same antigen as the parent (e.g., cancer associated antigen). In some embodiments, a total of 1 to 10 amino acids have been substituted, inserted and/or deleted in the amino acid sequence SEQ ID NO: 398. In some embodiments, the substitutions, insertions, or deletions occur in regions outside the CDRs (e.g., in the FRs). Optionally, the antibody or antigen-binding fragment thereof comprises the VL sequence SEQ ID NO: 398, including one or more post-translational modifications of that sequence. In a particular embodiment, the VL comprises one, two or three CDRs selected from: a. CDR-L1, comprising the amino acid sequence SEQ ID NO: 940, b. CDR-L2, comprising the amino acid sequence SEQ ID NO: 1482, and c. CDR-L3, comprising the amino acid sequence SEQ ID NO: 2024.

[1849] In one aspect, an antibody or antigen-binding fragment thereof is provided, wherein the antibody or antigen-binding fragment thereof comprises a VH as in any of the embodiments provided above, and a VL as in any of the embodiments provided above. In some embodiments, the antibody or antigen-binding fragment thereof comprises the VH amino acid sequence of SEQ ID NO: 127, and the VL amino acid sequence of SEQ ID NO: 398, optionally including post-translational modifications of those sequences.

### TKIC1019

[1850] In one aspect, the present disclosure provides an antibody or antigen-binding fragment thereof comprising at least one or both variable regions selected from: a. VH comprising the amino acid sequence of SEQ ID NO: 128 and b. VL comprising the amino acid sequence of SEQ ID NO: 399.

[1851] In one aspect, the present disclosure provides an antibody or antigen-binding fragment thereof comprising at least one, two, three, four, five, or six CDRs selected from: a. CDR-H1 comprising the amino acid sequence of SEQ ID NO: 670, b. CDR-H2 comprising the amino acid sequence of SEQ ID NO: 1212, c. CDR-H3 comprising the amino acid sequence of SEQ ID NO: 1754, d. CDR-L1 comprising the amino acid sequence of SEQ ID NO: 941, e. CDR-L2 comprising the amino acid sequence of SEQ ID NO: 1483, and f. CDR-L3 comprising the amino acid sequence of SEQ ID NO: 2025.

[1852] In one aspect, the present disclosure provides an antibody or antigen-binding fragment thereof comprising a CDR-H3 comprising the amino acid sequence of SEQ ID NO: 1754, and a CDR-L3 comprising the amino acid sequence of SEQ ID NO: 2025.

[1853] In one aspect, the present disclosure provides an antibody or antigen-binding fragment thereof comprising at least one, at least two, or all three VH CDR sequences selected from: a. CDR-H1 comprising the amino acid sequence of SEQ ID NO: 670, b. CDR-H2 comprising the amino acid sequence of SEQ ID NO: 1212, c. CDR-H3 comprising the amino acid sequence of SEQ ID NO: 1754, and a VL comprising the amino acid sequence of SEQ ID NO: 399.

[1854] In one aspect, the present disclosure provides an antibody or antigen-binding fragment thereof comprising at least one, at least two, or all three VL CDR sequences selected from: a. CDR-L1 comprising the amino acid sequence of SEQ ID NO: 941, b. CDR-L2 comprising the amino acid sequence of SEQ ID NO: 1483, c. CDR-L3 comprising the amino acid sequence of SEQ ID NO: 2025, and a VH comprising the amino acid sequence of SEQ ID NO: 128.

[1855] In one aspect, an antibody or antigen-binding fragment thereof is provided, wherein the antibody or antigen-binding fragment thereof comprises a heavy chain variable domain (VH) having at least 90%, 91%, 92%, 93%, 94%, 95%, 96%, 97%, 98%, 99%, or 100% sequence identity to the amino acid sequence SEQ ID NO: 128. In some embodiments, a VH sequence having at least 90%, 91%, 92%, 93%, 94%, 95%, 96%, 97%, 98%, or 99% identity contains substitutions (e.g., conservative substitutions), insertions, or deletions relative to the reference sequence, but an antibody or antigen-binding fragment thereof comprising that sequence retains the ability to bind to same antigen as of the parent (e.g., cancer associated antigen). In some embodiments, a total of 1 to 10 amino acids have been substituted, inserted and/or deleted in the amino acid sequence SEQ ID NO: 128. In some embodiments, substitutions, insertions, or deletions occur in regions outside the CDRs (e.g., in the FRs). Optionally, the antibody or antigen-binding fragment thereof comprises the VH sequence SEQ ID NO: 128, including one or more post-translational modifications of that sequence. In a particular embodiment, the VH comprises one, two or three CDRs selected from: a. CDR-H1, comprising the amino acid sequence SEQ ID NO: 670, b. CDR-H2, comprising the amino acid sequence SEQ ID NO: 1212, and c. CDR-H3, comprising the amino acid sequence SEQ ID NO: 1754.

[1856] In one aspect, an antibody or antigen-binding fragment thereof is provided, wherein the antibody or antigen-binding fragment thereof comprises a light chain variable domain (VL) having at least 90%, 91%, 92%, 93%, 94%, 95%, 96%, 97%, 98%, 99%, or 100% sequence identity to the amino acid sequence SEQ ID NO: 399. In some embodiments, a VL sequence having at least 90%, 91%, 92%, 93%, 94%, 95%, 96%, 97%, 98%, or 99% identity contains substitutions (e.g., conservative substitutions), insertions, or deletions relative to the reference sequence, but an antibody or antigen-binding fragment thereof comprising that sequence retains the ability to bind to same antigen as the parent (e.g., cancer associated antigen). In some embodiments, a total of 1 to 10 amino acids have been substituted, inserted and/or deleted in the amino acid sequence SEQ ID NO: 399. In some embodiments, the substitutions, insertions, or deletions occur in regions outside the CDRs (e.g., in the FRs). Optionally, the antibody or antigen-binding fragment thereof comprises the VL sequence SEQ ID NO: 399, including one or more post-translational modifications of that sequence. In a particular embodiment, the VL comprises one, two or three CDRs selected from: a. CDR-L1, comprising the amino acid sequence SEQ ID NO: 941, b. CDR-L2, comprising the amino acid sequence SEQ ID NO: 1483, and c. CDR-L3, comprising the amino acid sequence SEQ ID NO: 2025.

[1857] In one aspect, an antibody or antigen-binding fragment thereof is provided, wherein the antibody or antigen-binding fragment thereof comprises a VH as in any of the embodiments provided above, and a VL as in any of the embodiments provided above. In some embodiments, the antibody or antigen-binding fragment thereof comprises the VH amino acid sequence of SEQ ID NO: 128, and the VL amino acid sequence of SEQ ID NO: 399, optionally including post-translational modifications of those sequences.

### TKIC1020

[1858] In one aspect, the present disclosure provides an antibody or antigen-binding fragment thereof comprising at least one or both variable regions selected from: a. VH comprising the amino acid sequence of SEQ ID NO: 129 and b. VL comprising the amino acid sequence of SEQ ID NO: 400.

[1859] In one aspect, the present disclosure provides an antibody or antigen-binding fragment thereof comprising at least one, two, three, four, five, or six CDRs selected from: a. CDR-H1 comprising the amino acid sequence of SEQ ID NO: 671, b. CDR-H2 comprising the amino acid sequence of SEQ ID NO: 1213, c. CDR-H3 comprising the amino acid sequence of SEQ ID NO: 1755, d. CDR-L1 comprising the amino acid sequence of SEQ ID NO: 942, e. CDR-L2 comprising the amino acid sequence of SEQ ID NO: 1484, and f. CDR-L3 comprising the amino acid sequence of SEQ ID NO: 2026.

[1860] In one aspect, the present disclosure provides an antibody or antigen-binding fragment thereof comprising a CDR-H3 comprising the amino acid sequence of SEQ ID NO: 1755, and a CDR-L3 comprising the amino acid sequence of SEQ ID NO: 2026.

[1861] In one aspect, the present disclosure provides an antibody or antigen-binding fragment thereof comprising at least one, at least two, or all three VH CDR sequences selected from: a. CDR-H1 comprising the amino acid sequence of SEQ ID NO: 671, b. CDR-H2 comprising the amino acid sequence of SEQ ID NO: 1213, c. CDR-H3 comprising the amino acid sequence of SEQ ID NO: 1755, and a VL comprising the amino acid sequence of SEQ ID NO: 400.

[1862] In one aspect, the present disclosure provides an antibody or antigen-binding fragment thereof comprising at least one, at least two, or all three VL CDR sequences selected from: a. CDR-L1 comprising the amino acid sequence of SEQ ID NO: 942, b. CDR-L2 comprising the amino acid sequence of SEQ ID NO: 1484, c. CDR-L3 comprising the amino acid sequence of SEQ ID NO: 2026, and a VH comprising the amino acid sequence of SEQ ID NO: 129.

[1863] In one aspect, an antibody or antigen-binding fragment thereof is provided, wherein the antibody or antigen-binding fragment thereof comprises a heavy chain variable domain (VH) having at least 90%, 91%, 92%, 93%, 94%, 95%, 96%, 97%, 98%, 99%, or 100% sequence identity to the amino acid sequence SEQ ID NO: 129. In some embodiments, a VH sequence having at least 90%, 91%, 92%, 93%, 94%, 95%, 96%, 97%, 98%, or 99% identity contains substitutions (e.g., conservative substitutions), insertions, or deletions relative to the reference sequence, but an antibody or antigen-binding fragment thereof comprising that sequence retains the ability to bind to same antigen as of the parent (e.g., cancer associated antigen). In some embodiments, a total of 1 to 10 amino acids have been substituted, inserted and/or deleted in the amino acid sequence SEQ ID NO: 129. In some embodiments, substitutions, insertions, or deletions occur in regions outside the CDRs (e.g., in the FRs). Optionally, the antibody or antigen-binding fragment thereof comprises the VH sequence SEQ ID NO: 129, including one or more post-translational modifications of that sequence. In a particular embodiment, the VH comprises one, two or three CDRs selected from: a. CDR-H1, comprising the amino acid sequence SEQ ID NO: 671, b. CDR-H2, comprising the amino acid sequence SEQ ID NO: 1213, and c. CDR-H3, comprising the amino acid sequence SEQ ID NO: 1755.

[1864] In one aspect, an antibody or antigen-binding fragment thereof is provided, wherein the antibody or antigen-binding fragment thereof comprises a light chain variable domain (VL) having at least 90%, 91%, 92%, 93%, 94%, 95%, 96%, 97%, 98%, 99%, or 100% sequence identity to the amino acid sequence SEQ ID NO: 400. In some embodiments, a VL sequence having at least 90%, 91%, 92%, 93%, 94%, 95%, 96%, 97%, 98%, or 99% identity contains substitutions (e.g., conservative substitutions), thereof comprising that sequence retains the ability to bind to same antigen as the parent (e.g., cancer associated antigen). In some embodiments, a total of 1 to 10 amino acids have been substituted, inserted and/or deleted in the amino acid sequence SEQ ID NO: 400. In some embodiments, the substitutions, insertions, or deletions occur in regions outside the CDRs (e.g., in the FRs). Optionally, the antibody or antigen-binding fragment thereof comprises the VL sequence SEQ ID NO: 400, including one or more post-translational modifications of that sequence. In a particular embodiment, the VL comprises one, two or three CDRs selected from: a. CDR-L1, comprising the amino acid sequence SEQ ID NO: 942, b. CDR-L2, comprising the amino acid sequence SEQ ID NO: 1484, and c. CDR-L3, comprising the amino acid sequence SEQ ID NO: 2026.

[1865] In one aspect, an antibody or antigen-binding fragment thereof is provided, wherein the antibody or antigen-binding fragment thereof comprises a VH as in any of the embodiments provided above, and a VL as in any of the embodiments provided above. In some embodiments, the antibody or antigen-binding fragment thereof comprises the VH amino acid sequence of SEQ ID NO: 129, and the VL amino acid sequence of SEQ ID NO: 400, optionally including post-translational modifications of those sequences.

### TKIP1001

[1866] In one aspect, the present disclosure provides an antibody or antigen-binding fragment thereof comprising at least one or both variable regions selected from: a. VH comprising the amino acid sequence of SEQ ID NO: 130 and b. VL comprising the amino acid sequence of SEQ ID NO: 401.

[1867] In one aspect, the present disclosure provides an antibody or antigen-binding fragment thereof comprising at least one, two, three, four, five, or six CDRs selected from: a. CDR-H1 comprising the amino acid sequence of SEQ ID NO: 672, b. CDR-H2 comprising the amino acid sequence of SEQ ID NO: 1214, c. CDR-H3 comprising the amino acid sequence of SEQ ID NO: 1756, d. CDR-L1 comprising the amino acid sequence of SEQ ID NO: 943, e. CDR-L2 comprising the amino acid sequence of SEQ ID NO: 1485, and f. CDR-L3 comprising the amino acid sequence of SEQ ID NO: 2027.

[1868] In one aspect, the present disclosure provides an antibody or antigen-binding fragment thereof comprising a CDR-H3 comprising the amino acid sequence of SEQ ID NO: 1756, and a CDR-L3 comprising the amino acid sequence of SEQ ID NO: 2027.

[1869] In one aspect, the present disclosure provides an antibody or antigen-binding fragment thereof comprising at least one, at least two, or all three VH CDR sequences selected from: a. CDR-H1 comprising the amino acid sequence of SEQ ID NO: 672, b. CDR-H2 comprising the amino acid sequence of SEQ ID NO: 1214, c. CDR-H3 comprising the amino acid sequence of SEQ ID NO: 1756, and a VL comprising the amino acid sequence of SEQ ID NO: 401.

[1870] In one aspect, the present disclosure provides an antibody or antigen-binding fragment thereof comprising at least one, at least two, or all three VL CDR sequences selected from: a. CDR-L1 comprising the amino acid sequence of SEQ ID NO: 943, b. CDR-L2 comprising the amino acid sequence of SEQ ID NO: 1485, c. CDR-L3 comprising the amino acid sequence of SEQ ID NO: 2027, and a VH comprising the amino acid sequence of SEQ ID NO: 130.

[1871] In one aspect, an antibody or antigen-binding fragment thereof is provided, wherein the antibody or antigen-binding fragment thereof comprises a heavy chain variable domain (VH) having at least 90%, 91%, 92%, 93%, 94%, 95%, 96%, 97%, 98%, 99%, or 100% sequence identity to the amino acid sequence SEQ ID NO: 130. In some embodiments, a VH sequence having at least 90%, 91%, 92%, 93%, 94%, 95%, 96%, 97%, 98%, or 99% identity contains substitutions (e.g., conservative substitutions), insertions, or deletions relative to the reference sequence, but an antibody or antigen-binding fragment thereof comprising that sequence retains the ability to bind to same antigen as of the parent (e.g., cancer associated antigen). In some embodiments, a total of 1 to 10 amino acids have been substituted, inserted and/or deleted in the amino acid sequence SEQ ID NO: 130. In some embodiments, substitutions, insertions, or deletions occur in regions outside the CDRs (e.g., in the FRs). Optionally, the antibody or antigen-binding fragment thereof comprises the VH sequence SEQ ID NO: 130, including one or more post-translational modifications of that sequence. In a particular embodiment, the VH comprises one, two or three CDRs selected from: a. CDR-H1, comprising the amino acid sequence SEQ ID NO: 672, b. CDR-H2, comprising the amino acid sequence SEQ ID NO: 1214, and c. CDR-H3, comprising the amino acid sequence SEQ ID NO: 1756.

[1872] In one aspect, an antibody or antigen-binding fragment thereof is provided, wherein the antibody or antigen-binding fragment thereof comprises a light chain variable domain (VL) having at least 90%, 91%, 92%, 93%, 94%, 95%, 96%, 97%, 98%, 99%, or 100% sequence identity to the amino acid sequence SEQ ID NO: 401. In some embodiments, a VL sequence having at least 90%, 91%, 92%, 93%, 94%, 95%, 96%, 97%, 98%, or 99% identity contains substitutions (e.g., conservative substitutions), insertions, or deletions relative to the reference sequence, but an antibody or antigen-binding fragment thereof comprising that sequence retains the ability to bind to same antigen as the parent (e.g., cancer associated antigen). In some embodiments, a total of 1 to 10 amino acids have been substituted, inserted and/or deleted in the amino acid sequence SEQ ID NO: 401. In some embodiments, the substitutions, insertions, or deletions occur in regions outside the CDRs (e.g., in the FRs). Optionally, the antibody or antigen-binding fragment thereof comprises the VL sequence SEQ ID NO: 401, including one or more post-translational modifications of that sequence. In a particular embodiment, the VL comprises one, two or three CDRs selected from: a. CDR-L1, comprising the amino acid sequence SEQ ID NO: 943, b. CDR-L2, comprising the amino acid sequence SEQ ID NO: 1485, and c. CDR-L3, comprising the amino acid sequence SEQ ID NO: 2027.

[1873] In one aspect, an antibody or antigen-binding fragment thereof is provided, wherein the antibody or antigen-binding fragment thereof comprises a VH as in any of the embodiments provided above, and a VL as in any of the embodiments provided above. In some embodiments, the antibody or antigen-binding fragment thereof comprises the VH amino acid sequence of SEQ ID NO: 130, and the VL amino acid sequence of SEQ ID NO: 401, optionally including post-translational modifications of those sequences.

### TKIP1002

[1874] In one aspect, the present disclosure provides an antibody or antigen-binding fragment thereof comprising at least one or both variable regions selected from: a. VH comprising the amino acid sequence of SEQ ID NO: 131 and b. VL comprising the amino acid sequence of SEQ ID NO: 402.

[1875] In one aspect, the present disclosure provides an antibody or antigen-binding fragment thereof comprising at least one, two, three, four, five, or six CDRs selected from: a. CDR-H1 comprising the amino acid sequence of SEQ ID NO: 673, b. CDR-H2 comprising the amino acid sequence of SEQ ID NO: 1215, c. CDR-H3 comprising the amino acid sequence of SEQ ID NO: 1757, d. CDR-L1 comprising the amino acid sequence of SEQ ID NO: 944, e. CDR-L2 comprising the amino acid sequence of SEQ ID NO: 1486, and f. CDR-L3 comprising the amino acid sequence of SEQ ID NO: 2028.

[1876] In one aspect, the present disclosure provides an antibody or antigen-binding fragment thereof comprising at least one, at least two, or all three VH CDR sequences selected from: a. CDR-H1 comprising the amino acid sequence of SEQ ID NO: 673, b. CDR-H2 comprising the amino acid sequence of SEQ ID NO: 1215, c. CDR-H3 comprising the amino acid sequence of SEQ ID NO: 1757, and a VL comprising the amino acid sequence of SEQ ID NO: 402.

[1877] In one aspect, the present disclosure provides an antibody or antigen-binding fragment thereof comprising at least one, at least two, or all three VL CDR sequences selected from: a. CDR-L1 comprising the amino acid sequence of SEQ ID NO: 944, b. CDR-L2 comprising the amino acid sequence of SEQ ID NO: 1486, c. CDR-L3 comprising the amino acid sequence of SEQ ID NO: 2028, and a VH comprising the amino acid sequence of SEQ ID NO: 131.

[1878] In one aspect, an antibody or antigen-binding fragment thereof is provided, wherein the antibody or antigen-binding fragment thereof comprises a heavy chain variable domain (VH) having at least 90%, 91%, 92%, 93%, 94%, 95%, 96%, 97%, 98%, 99%, or 100% sequence identity to the amino acid sequence SEQ ID NO: 131. In some embodiments, a VH sequence having at least 90%, 91%, 92%, 93%, 94%, 95%, 96%, 97%, 98%, or 99% identity contains substitutions (e.g., conservative substitutions), insertions, or deletions relative to the reference sequence, but an antibody or antigen-binding fragment thereof comprising that sequence retains the ability to bind to same antigen as of the parent (e.g., cancer associated antigen). In some embodiments, a total of 1 to 10 amino acids have been substituted, inserted and/or deleted in the amino acid sequence SEQ ID NO: 131. In some embodiments, substitutions, insertions, or deletions occur in regions outside the CDRs (e.g., in the FRs). Optionally, the antibody or antigen-binding fragment thereof comprises the VH sequence SEQ ID NO: 131, including one or more post-translational modifications of that sequence. In a particular embodiment, the VH comprises one, two or three CDRs selected from: a. CDR-H1, comprising the amino acid sequence SEQ ID NO: 673, b. CDR-H2, comprising the amino acid sequence SEQ ID NO: 1215, and c. CDR-H3, comprising the amino acid sequence SEQ ID NO: 1757.

[1879] In one aspect, an antibody or antigen-binding fragment thereof is provided, wherein the antibody or antigen-binding fragment thereof comprises a light chain variable domain (VL) having at least 90%, 91%, 92%, 93%, 94%, 95%, 96%, 97%, 98%, 99%, or 100% sequence identity to the amino acid sequence SEQ ID NO: 402. In some embodiments, a VL sequence having at least 90%, 91%, 92%, 93%, 94%, 95%, 96%, 97%, 98%, or 99% identity contains substitutions (e.g., conservative substitutions), insertions, or deletions relative to the reference sequence, but an antibody or antigen-binding fragment thereof comprising that sequence retains the ability to bind to same antigen as the parent (e.g., cancer associated antigen). In some embodiments, a total of 1 to 10 amino acids have been substituted, inserted and/or deleted in the amino acid sequence SEQ ID NO: 402. In some embodiments, the substitutions, insertions, or deletions occur in regions outside the CDRs (e.g., in the FRs). Optionally, the antibody or antigen-binding fragment thereof comprises the VL sequence SEQ ID NO: 402, including one or more post-translational modifications of that sequence. In a particular embodiment, the VL comprises one, two or three CDRs selected from: a. CDR-L1, comprising the amino acid sequence SEQ ID NO: 944, b. CDR-L2, comprising the amino acid sequence SEQ ID NO: 1486, and c. CDR-L3, comprising the amino acid sequence SEQ ID NO: 2028.

[1880] In one aspect, an antibody or antigen-binding fragment thereof is provided, wherein the antibody or antigen-binding fragment thereof comprises a VH as in any of the embodiments provided above, and a VL as in any of the embodiments provided above. In some embodiments, the antibody or antigen-binding fragment thereof comprises the VH amino acid sequence of SEQ ID NO: 131, and the VL amino acid sequence of SEQ ID NO: 402, optionally including post-translational modifications of those sequences.

### TKIP1003

[1881] In one aspect, the present disclosure provides an antibody or antigen-binding fragment thereof comprising at least one or both variable regions selected from: a. VH comprising the amino acid sequence of SEQ ID NO: 132 and b. VL comprising the amino acid sequence of SEQ ID NO: 403.

[1882] In one aspect, the present disclosure provides an antibody or antigen-binding fragment thereof comprising at least one, two, three, four, five, or six CDRs selected from: a. CDR-H1 comprising the amino acid sequence of SEQ ID NO: 674, b. CDR-H2 comprising the amino acid sequence of SEQ ID NO: 1216, c. CDR-H3 comprising the amino acid sequence of SEQ ID NO: 1758, d. CDR-L1 comprising the amino acid sequence of SEQ ID NO: 945, e. CDR-L2 comprising the amino acid sequence of SEQ ID NO: 1487, and f. CDR-L3 comprising the amino acid sequence of SEQ ID NO: 2029.

[1883] In one aspect, the present disclosure provides an antibody or antigen-binding fragment thereof comprising a CDR-H3 comprising the amino acid sequence of SEQ ID NO: 1758, and a CDR-L3 comprising the amino acid sequence of SEQ ID NO: 2029.

[1884] In one aspect, the present disclosure provides an antibody or antigen-binding fragment thereof comprising at least one, at least two, or all three VH CDR sequences selected from: a CDR-H1 comprising the amino acid sequence of SEQ ID NO: 674, b. CDR-H2 comprising the amino acid sequence of SEQ ID NO: 1216, c. CDR-H3 comprising the amino acid sequence of SEQ ID NO: 1758, and a VL comprising the amino acid sequence of SEQ ID NO: 403.

[1885] In one aspect, the present disclosure provides an antibody or antigen-binding fragment thereof comprising at least one, at least two, or all three VL CDR sequences selected from: a. CDR-L1 comprising the amino acid sequence of SEQ ID NO: 945, b. CDR-L2 comprising the amino acid sequence of SEQ ID NO: 1487, c. CDR-L3 comprising the amino acid sequence of SEQ ID NO: 2029, and a VH comprising the amino acid sequence of SEQ ID NO: 132.

[1886] In one aspect, an antibody or antigen-binding fragment thereof is provided, wherein the antibody or antigen-binding fragment thereof comprises a heavy chain variable domain (VH) having at least 90%, 91%, 92%, 93%, 94%, 95%, 96%, 97%, 98%, 99%, or 100% sequence identity to the amino acid sequence SEQ ID NO: 132. In some embodiments, a VH sequence having at least 90%, 91%, 92%, 93%, 94%, 95%, 96%, 97%, 98%, or 99% identity contains substitutions (e.g., conservative substitutions), insertions, or deletions relative to the reference sequence, but an antibody or antigen-binding fragment thereof comprising that sequence retains the ability to bind to same antigen as of the parent (e.g., cancer associated antigen). In some embodiments, a total of 1 to 10 amino acids have been substituted, inserted and/or deleted in the amino acid sequence SEQ ID NO: 132. In some embodiments, substitutions, insertions, or deletions occur in regions outside the CDRs (e.g., in the FRs). Optionally, the antibody or antigen-binding fragment thereof comprises the VH sequence SEQ ID NO: 132, including one or more post-translational modifications of that sequence. In a particular embodiment, the VH comprises one, two or three CDRs selected from: a. CDR-H1, comprising the amino acid sequence SEQ ID NO: 674, b. CDR-H2, comprising the amino acid sequence SEQ ID NO: 1216, and c. CDR-H3, comprising the amino acid sequence SEQ ID NO: 1758.

[1887] In one aspect, an antibody or antigen-binding fragment thereof is provided, wherein the antibody or antigen-binding fragment thereof comprises a light chain variable domain (VL) having at least 90%, 91%, 92%, 93%, 94%, 95%, 96%, 97%, 98%, 99%, or 100% sequence identity to the amino acid sequence SEQ ID NO: 403. In some embodiments, a VL sequence having at least 90%, 91%, 92%, 93%, 94%, 95%, 96%, 97%, 98%, or 99% identity contains substitutions (e.g., conservative substitutions), insertions, or deletions relative to the reference sequence, but an antibody or antigen-binding fragment thereof comprising that sequence retains the ability to bind to same antigen as the parent (e.g., cancer associated antigen). In some embodiments, a total of 1 to 10 amino acids have been substituted, inserted and/or deleted in the amino acid sequence SEQ ID NO: 403. In some embodiments, the substitutions, insertions, or deletions occur in regions outside the CDRs (e.g., in the FRs). Optionally, the antibody or antigen-binding fragment thereof comprises the VL sequence SEQ ID NO: 403, including one or more post-translational modifications of that sequence. In a particular embodiment, the VL comprises one, two or three CDRs selected from: a. CDR-L1, comprising the amino acid sequence SEQ ID NO: 945, b. CDR-L2, comprising the amino acid sequence SEQ ID NO: 1487, and c. CDR-L3, comprising the amino acid sequence SEQ ID NO: 2029.

[1888] In one aspect, an antibody or antigen-binding fragment thereof is provided, wherein the antibody or antigen-binding fragment thereof comprises a VH as in any of the embodiments provided above, and a VL as in any of the embodiments provided above. In some embodiments, the antibody or antigen-binding fragment thereof comprises the VH amino acid sequence of SEQ ID NO: 132, and the VL amino acid sequence of SEQ ID NO: 403, optionally including post-translational modifications of those sequences.

### TKIP1004

[1889] In one aspect, the present disclosure provides an antibody or antigen-binding fragment thereof comprising at least one or both variable regions selected from: a. VH comprising the amino acid sequence of SEQ ID NO: 133 and b. VL comprising the amino acid sequence of SEQ ID NO: 404.

[1890] In one aspect, the present disclosure provides an antibody or antigen-binding fragment thereof comprising at least one, two, three, four, five, or six CDRs selected from: a. CDR-H1 comprising the amino acid sequence of SEQ ID NO: 675, b. CDR-H2 comprising the amino acid sequence of SEQ ID NO: 1217, c. CDR-H3 comprising the amino acid sequence of SEQ ID NO: 1759, d. CDR-L1 comprising the amino acid sequence of SEQ ID NO: 946, e. CDR-L2 comprising the amino acid sequence of SEQ ID NO: 1488, and f. CDR-L3 comprising the amino acid sequence of SEQ ID NO: 2030.

[1891] In one aspect, the present disclosure provides an antibody or antigen-binding fragment thereof comprising a CDR-H3 comprising the amino acid sequence of SEQ ID NO: 1759, and a CDR-L3 comprising the amino acid sequence of SEQ ID NO: 2030.

[1892] In one aspect, the present disclosure provides an antibody or antigen-binding fragment thereof comprising at least one, at least two, or all three VH CDR sequences selected from: a. CDR-H1 comprising the amino acid sequence of SEQ ID NO: 675, b. CDR-H2 comprising the amino acid sequence of SEQ ID NO: 1217, c. CDR-H3 comprising the amino acid sequence of SEQ ID NO: 1759, and a VL comprising the amino acid sequence of SEQ ID NO: 404.

[1893] In one aspect, the present disclosure provides an antibody or antigen-binding fragment thereof comprising at least one, at least two, or all three VL CDR sequences selected from: a. CDR-L1 comprising the amino acid sequence of SEQ ID NO: 946, b. CDR-L2 comprising the amino acid sequence of SEQ ID NO: 1488, c. CDR-L3 comprising the amino acid sequence of SEQ ID NO: 2030, and a VH comprising the amino acid sequence of SEQ ID NO: 133.

[1894] In one aspect, an antibody or antigen-binding fragment thereof is provided, wherein the antibody or antigen-binding fragment thereof comprises a heavy chain variable domain (VH) having at least 90%, 91%, 92%, 93%, 94%, 95%, 96%, 97%, 98%, 99%, or 100% sequence identity to the amino acid sequence SEQ ID NO: 133. In some embodiments, a VH sequence having at least 90%, 91%, 92%, 93%, 94%, 95%, 96%, 97%, 98%, or 99% identity contains substitutions (e.g., conservative substitutions), insertions, or deletions relative to the reference sequence, but an antibody or antigen-binding fragment thereof comprising that sequence retains the ability to bind to same antigen as of the parent (e.g., cancer associated antigen). In some embodiments, a total of 1 to 10 amino acids have been substituted, inserted and/or deleted in the amino acid sequence SEQ ID NO: 133. In some embodiments, substitutions, insertions, or deletions occur in regions outside the CDRs (e.g., in the FRs). Optionally, the antibody or antigen-binding fragment thereof comprises the VH sequence SEQ ID NO: 133, including one or more post-translational modifications of that sequence. In a particular embodiment, the VH comprises one, two or three CDRs selected from: a CDR-H1, comprising the amino acid sequence SEQ ID NO: 675, b. CDR-H2, comprising the amino acid sequence SEQ ID NO: 1217, and c. CDR-H3, comprising the amino acid sequence SEQ ID NO: 1759.

[1895] In one aspect, an antibody or antigen-binding fragment thereof is provided, wherein the antibody or antigen-binding fragment thereof comprises a light chain variable domain (VL) having at least 90%, 91%, 92%, 93%, 94%, 95%, 96%, 97%, 98%, 99%, or 100% sequence identity to the amino acid sequence SEQ ID NO: 404. In some embodiments, a VL sequence having at least 90%, 91%, 92%, 93%, 94%, 95%, 96%, 97%, 98%, or 99% identity contains substitutions (e.g., conservative substitutions), insertions, or deletions relative to the reference sequence, but an antibody or antigen-binding fragment thereof comprising that sequence retains the ability to bind to same antigen as the parent (e.g., cancer associated antigen). In some embodiments, a total of 1 to 10 amino acids have been substituted, inserted and/or deleted in the amino acid sequence SEQ ID NO: 404. In some embodiments, the substitutions, insertions, or deletions occur in regions outside the CDRs (e.g., in the FRs). Optionally, the antibody or antigen-binding fragment thereof comprises the VL sequence SEQ ID NO: 404, including one or more post-translational modifications of that sequence. In a particular embodiment, the VL comprises one, two or three CDRs selected from: a. CDR-L1, comprising the amino acid sequence SEQ ID NO: 946, b. CDR-L2, comprising the amino acid sequence SEQ ID NO: 1488, and c. CDR-L3, comprising the amino acid sequence SEQ ID NO: 2030.

[1896] In one aspect, an antibody or antigen-binding fragment thereof is provided, wherein the antibody or antigen-binding fragment thereof comprises a VH as in any of the embodiments provided above, and a VL as in any of the embodiments provided above. In some embodiments, the antibody or antigen-binding fragment thereof comprises the VH amino acid sequence of SEQ ID NO: 133, and the VL amino acid sequence of SEQ ID NO: 404, optionally including post-translational modifications of those sequences.

### TKIP1005

[1897] In one aspect, the present disclosure provides an antibody or antigen-binding fragment thereof comprising at least one or both variable regions selected from: a. VH comprising the amino acid sequence of SEQ ID NO: 134 and b. VL comprising the amino acid sequence of SEQ ID NO: 405.

[1898] In one aspect, the present disclosure provides an antibody or antigen-binding fragment thereof comprising at least one, two, three, four, five, or six CDRs selected from: a. CDR-H1 comprising the amino acid sequence of SEQ ID NO: 676, b. CDR-H2 comprising the amino acid sequence of SEQ ID NO: 1218, c. CDR-H3 comprising the amino acid sequence of SEQ ID NO: 1760, d. CDR-L1 comprising the amino acid sequence of SEQ ID NO: 947, e. CDR-L2 comprising the amino acid sequence of SEQ ID NO: 1489, and f. CDR-L3 comprising the amino acid sequence of SEQ ID NO: 2031.

[1899] In one aspect, the present disclosure provides an antibody or antigen-binding fragment thereof comprising a CDR-H3 comprising the amino acid sequence of SEQ ID NO: 1760, and a CDR-L3 comprising the amino acid sequence of SEQ ID NO: 2031.

[1900] In one aspect, the present disclosure provides an antibody or antigen-binding fragment thereof comprising at least one, at least two, or all three VH CDR sequences selected from: a. CDR-H1 comprising the amino acid sequence of SEQ ID NO: 676, b. CDR-H2 comprising the amino acid sequence of SEQ ID NO: 1218, c. CDR-H3 comprising the amino acid sequence of SEQ ID NO: 1760, and a VL comprising the amino acid sequence of SEQ ID NO: 405.

[1901] In one aspect, the present disclosure provides an antibody or antigen-binding fragment thereof comprising at least one, at least two, or all three VL CDR sequences selected from: a. CDR-L1 comprising the amino acid sequence of SEQ ID NO: 947, b. CDR-L2 comprising the amino acid sequence of SEQ ID NO: 1489, c. CDR-L3 comprising the amino acid sequence of SEQ ID NO: 2031, and a VH comprising the amino acid sequence of SEQ ID NO: 134.

[1902] In one aspect, an antibody or antigen-binding fragment thereof is provided, wherein the antibody or antigen-binding fragment thereof comprises a heavy chain variable domain (VH) having at least 90%, 91%, 92%, 93%, 94%, 95%, 96%, 97%, 98%, 99%, or 100% sequence identity to the amino acid sequence SEQ ID NO: 134. In some embodiments, a VH sequence having at least 90%, 91%, 92%, 93%, 94%, 95%, 96%, 97%, 98%, or 99% identity contains substitutions (e.g., conservative substitutions), insertions, or deletions relative to the reference sequence, but an antibody or antigen-binding fragment thereof comprising that sequence retains the ability to bind to same antigen as of the parent (e.g., cancer associated antigen). In some embodiments, a total of 1 to 10 amino acids have been substituted, inserted and/or deleted in the amino acid sequence SEQ ID NO: 134. In some embodiments, substitutions, insertions, or deletions occur in regions outside the CDRs (e.g., in the FRs). Optionally, the antibody or antigen-binding fragment thereof comprises the VH sequence SEQ ID NO: 134, including one or more post-translational modifications of that sequence. In a particular embodiment, the VH comprises one, two or three CDRs selected from: a. CDR-H1, comprising the amino acid sequence SEQ ID NO: 676, b. CDR-H2, comprising the amino acid sequence SEQ ID NO: 1218, and c. CDR-H3, comprising the amino acid sequence SEQ ID NO: 1760.

[1903] In one aspect, an antibody or antigen-binding fragment thereof is provided, wherein the antibody or antigen-binding fragment thereof comprises a light chain variable domain (VL) having at least 90%, 91%, 92%, 93%, 94%, 95%, 96%, 97%, 98%, 99%, or 100% sequence identity to the amino acid sequence SEQ ID NO: 405. In some embodiments, a VL sequence having at least 90%, 91%, 92%, 93%, 94%, 95%, 96%, 97%, 98%, or 99% identity contains substitutions (e.g., conservative substitutions), insertions, or deletions relative to the reference sequence, but an antibody or antigen-binding fragment thereof comprising that sequence retains the ability to bind to same antigen as the parent (e.g., cancer associated antigen). In some embodiments, a total of 1 to 10 amino acids have been substituted, inserted and/or deleted in the amino acid sequence SEQ ID NO: 405. In some embodiments, the substitutions, insertions, or deletions occur in regions outside the CDRs (e.g., in the FRs). Optionally, the antibody or antigen-binding fragment thereof comprises the VL sequence SEQ ID NO: 405, including one or more post-translational modifications of that sequence. In a particular embodiment, the VL comprises one, two or three CDRs selected from: a. CDR-L1, comprising the amino acid sequence SEQ ID NO: 947, b. CDR-L2, comprising the amino acid sequence SEQ ID NO: 1489, and c. CDR-L3, comprising the amino acid sequence SEQ ID NO: 2031.

[1904] In one aspect, an antibody or antigen-binding fragment thereof is provided, wherein the antibody or antigen-binding fragment thereof comprises a VH as in any of the embodiments provided above, and a VL as in any of the embodiments provided above. In some embodiments, the antibody or antigen-binding fragment thereof comprises the VH amino acid sequence of SEQ ID NO: 134, and the VL amino acid sequence of SEQ ID NO: 405, optionally including post-translational modifications of those sequences.

### TKIP1006

[1905] In one aspect, the present disclosure provides an antibody or antigen-binding fragment thereof comprising at least one or both variable regions selected from: a. VH comprising the amino acid sequence of SEQ ID NO: 135 and b. VL comprising the amino acid sequence of SEQ ID NO: 406.

[1906] In one aspect, the present disclosure provides an antibody or antigen-binding fragment thereof comprising at least one, two, three, four, five, or six CDRs selected from: a. CDR-H1 comprising the amino acid sequence of SEQ ID NO: 677, b. CDR-H2 comprising the amino acid sequence of SEQ ID NO: 1219, c. CDR-H3 comprising the amino acid sequence of SEQ ID NO: 1761, d. CDR-L1 comprising the amino acid sequence of SEQ ID NO: 948, e. CDR-L2 comprising the amino acid sequence of SEQ ID NO: 1490, and f. CDR-L3 comprising the amino acid sequence of SEQ ID NO: 2032.

[1907] In one aspect, the present disclosure provides an antibody or antigen-binding fragment thereof comprising a CDR-H3 comprising the amino acid sequence of SEQ ID NO: 1761, and a CDR-L3 comprising the amino acid sequence of SEQ ID NO: 2032.

[1908] In one aspect, the present disclosure provides an antibody or antigen-binding fragment thereof comprising at least one, at least two, or all three VH CDR sequences selected from: a. CDR-H1 comprising the amino acid sequence of SEQ ID NO: 677, b. CDR-H2 comprising the amino acid sequence of SEQ ID NO: 1219, c. CDR-H3 comprising the amino acid sequence of SEQ ID NO: 1761, and a VL comprising the amino acid sequence of SEQ ID NO: 406.

[1909] In one aspect, the present disclosure provides an antibody or antigen-binding fragment thereof comprising at least one, at least two, or all three VL CDR sequences selected from: a. CDR-L1 comprising the amino acid sequence of SEQ ID NO: 948, b. CDR-L2 comprising the amino acid sequence of SEQ ID NO: 1490, c. CDR-L3 comprising the amino acid sequence of SEQ ID NO: 2032, and a VH comprising the amino acid sequence of SEQ ID NO: 135.

[1910] In one aspect, an antibody or antigen-binding fragment thereof is provided, wherein the antibody or antigen-binding fragment thereof comprises a heavy chain variable domain (VH) having at least 90%, 91%, 92%, 93%, 94%, 95%, 96%, 97%, 98%, 99%, or 100% sequence identity to the amino acid sequence SEQ ID NO: 135. In some embodiments, a VH sequence having at least 90%, 91%, 92%, 93%, 94%, 95%, 96%, 97%, 98%, or 99% identity contains substitutions (e.g., conservative substitutions), insertions, or deletions relative to the reference sequence, but an antibody or antigen-binding fragment thereof comprising that sequence retains the ability to bind to same antigen as of the parent (e.g., cancer associated antigen). In some embodiments, a total of 1 to 10 amino acids have been substituted, inserted and/or deleted in the amino acid sequence SEQ ID NO: 135. In some embodiments, substitutions, insertions, or deletions occur in regions outside the CDRs (e.g., in the FRs). Optionally, the antibody or antigen-binding fragment thereof comprises the VH sequence SEQ ID NO: 135, including one or more post-translational modifications of that sequence. In a particular embodiment, the VH comprises one, two or three CDRs selected from: a. CDR-H1, comprising the amino acid sequence SEQ ID NO: 677, b. CDR-H2, comprising the amino acid sequence SEQ ID NO: 1219, and c. CDR-H3, comprising the amino acid sequence SEQ ID NO: 1761.

[1911] In one aspect, an antibody or antigen-binding fragment thereof is provided, wherein the antibody or antigen-binding fragment thereof comprises a light chain variable domain (VL) having at least 90%, 91%, 92%, 93%, 94%, 95%, 96%, 97%, 98%, 99%, or 100% sequence identity to the amino acid sequence SEQ ID NO: 406. In some embodiments, a VL sequence having at least 90%, 91%, 92%, 93%, 94%, 95%, 96%, 97%, 98%, or 99% identity contains substitutions (e.g., conservative substitutions), insertions, or deletions relative to the reference sequence, but an antibody or antigen-binding fragment thereof comprising that sequence retains the ability to bind to same antigen as the parent (e.g., cancer associated antigen). In some embodiments, a total of 1 to 10 amino acids have been substituted, inserted and/or deleted in the amino acid sequence SEQ ID NO: 406. In some embodiments, the substitutions, insertions, or deletions occur in regions outside the CDRs (e.g., in the FRs). Optionally, the antibody or antigen-binding fragment thereof comprises the VL sequence SEQ ID NO: 406, including one or more post-translational modifications of that sequence. In a particular embodiment, the VL comprises one, two or three CDRs selected from: a. CDR-L1, comprising the amino acid sequence SEQ ID NO: 948, b. CDR-L2, comprising the amino acid sequence SEQ ID NO: 1490, and c. CDR-L3, comprising the amino acid sequence SEQ ID NO: 2032.

[1912] In one aspect, an antibody or antigen-binding fragment thereof is provided, wherein the antibody or antigen-binding fragment thereof comprises a VH as in any of the embodiments provided above, and a VL as in any of the embodiments provided above. In some embodiments, the antibody or antigen-binding fragment thereof comprises the VH amino acid sequence of SEQ ID NO: 135, and the VL amino acid sequence of SEQ ID NO: 406, optionally including post-translational modifications of those sequences.

### TLGG1001

[1913] In one aspect, the present disclosure provides an antibody or antigen-binding fragment thereof comprising at least one or both variable regions selected from: a. VH comprising the amino acid sequence of SEQ ID NO: 136 and b. VL comprising the amino acid sequence of SEQ ID NO: 407.

[1914] In one aspect, the present disclosure provides an antibody or antigen-binding fragment thereof comprising at least one, two, three, four, five, or six CDRs selected from: a. CDR-H1 comprising the amino acid sequence of SEQ ID NO: 678, b. CDR-H2 comprising the amino acid sequence of SEQ ID NO: 1220, c. CDR-H3 comprising the amino acid sequence of SEQ ID NO: 1762, d. CDR-L1 comprising the amino acid sequence of SEQ ID NO: 949, e. CDR-L2 comprising the amino acid sequence of SEQ ID NO: 1491, and f. CDR-L3 comprising the amino acid sequence of SEQ ID NO: 2033.

[1915] In one aspect, the present disclosure provides an antibody or antigen-binding fragment thereof comprising a CDR-H3 comprising the amino acid sequence of SEQ ID NO: 1762, and a CDR-L3 comprising the amino acid sequence of SEQ ID NO: 2033.

[1916] In one aspect, the present disclosure provides an antibody or antigen-binding fragment thereof comprising at least one, at least two, or all three VH CDR sequences selected from: a. CDR-H1 comprising the amino acid sequence of SEQ ID NO: 678, b. CDR-H2 comprising the amino acid sequence of SEQ ID NO: 1220, c. CDR-H3 comprising the amino acid sequence of SEQ ID NO: 1762, and a VL comprising the amino acid sequence of SEQ ID NO: 407.

[1917] In one aspect, the present disclosure provides an antibody or antigen-binding fragment thereof comprising at least one, at least two, or all three VL CDR sequences selected from: a. CDR-L1 comprising the amino acid sequence of SEQ ID NO: 949, b. CDR-L2 comprising the amino acid sequence of SEQ ID NO: 1491, c. CDR-L3 comprising the amino acid sequence of SEQ ID NO: 2033, and a VH comprising the amino acid sequence of SEQ ID NO: 136.

[1918] In one aspect, an antibody or antigen-binding fragment thereof is provided, wherein the antibody or antigen-binding fragment thereof comprises a heavy chain variable domain (VH) having at least 90%, 91%, 92%, 93%, 94%, 95%, 96%, 97%, 98%, 99%, or 100% sequence identity to the amino acid sequence SEQ ID NO: 136. In some embodiments, a VH sequence having at least 90%, 91%, 92%, 93%, 94%, 95%, 96%, 97%, 98%, or 99% identity contains substitutions (e.g., conservative substitutions), insertions, or deletions relative to the reference sequence, but an antibody or antigen-binding fragment thereof comprising that sequence retains the ability to bind to same antigen as of the parent (e.g., cancer associated antigen). In some embodiments, a total of 1 to 10 amino acids have been substituted, inserted and/or deleted in the amino acid sequence SEQ ID NO: 136. In some embodiments, substitutions, insertions, or deletions occur in regions outside the CDRs (e.g., in the FRs). Optionally, the antibody or antigen-binding fragment thereof comprises the VH sequence SEQ ID NO: 136, including one or more post-translational modifications of that sequence. In a particular embodiment, the VH comprises one, two or three CDRs selected from: a. CDR-H1, comprising the amino acid sequence SEQ ID NO: 678, b. CDR-H2, comprising the amino acid sequence SEQ ID NO: 1220, and c. CDR-H3, comprising the amino acid sequence SEQ ID NO: 1762.

[1919] In one aspect, an antibody or antigen-binding fragment thereof is provided, wherein the antibody or antigen-binding fragment thereof comprises a light chain variable domain (VL) having at least 90%, 91%, 92%, 93%, 94%, 95%, 96%, 97%, 98%, 99%, or 100% sequence identity to the amino acid sequence SEQ ID NO: 407. In some embodiments, a VL sequence having at least 90%, 91%, 92%, 93%, 94%, 95%, 96%, 97%, 98%, or 99% identity contains substitutions (e.g., conservative substitutions), insertions, or deletions relative to the reference sequence, but an antibody or antigen-binding fragment thereof comprising that sequence retains the ability to bind to same antigen as the parent (e.g., cancer associated antigen). In some embodiments, a total of 1 to 10 amino acids have been substituted, inserted and/or deleted in the amino acid sequence SEQ ID NO: 407. In some embodiments, the substitutions, insertions, or deletions occur in regions outside the CDRs (e.g., in the FRs). Optionally, the antibody or antigen-binding fragment thereof comprises the VL sequence SEQ ID NO: 407, including one or more post-translational modifications of that sequence. In a particular embodiment, the VL comprises one, two or three CDRs selected from: a. CDR-L1, comprising the amino acid sequence SEQ ID NO: 949, b. CDR-L2, comprising the amino acid sequence SEQ ID NO: 1491, and c. CDR-L3, comprising the amino acid sequence SEQ ID NO: 2033.

[1920] In one aspect, an antibody or antigen-binding fragment thereof is provided, wherein the antibody or antigen-binding fragment thereof comprises a VH as in any of the embodiments provided above, and a VL as in any of the embodiments provided above. In some embodiments, the antibody or antigen-binding fragment thereof comprises the VH amino acid sequence of SEQ ID NO: 136, and the VL amino acid sequence of SEQ ID NO: 407, optionally including post-translational modifications of those sequences.

### TLIV1001

[1921] In one aspect, the present disclosure provides an antibody or antigen-binding fragment thereof comprising at least one or both variable regions selected from: a. VH comprising the amino acid sequence of SEQ ID NO: 137 and b. VL comprising the amino acid sequence of SEQ ID NO: 408.

[1922] In one aspect, the present disclosure provides an antibody or antigen-binding fragment thereof comprising at least one, two, three, four, five, or six CDRs selected from: a. CDR-H1 comprising the amino acid sequence of SEQ ID NO: 679, b. CDR-H2 comprising the amino acid sequence of SEQ ID NO: 1221, c. CDR-H3 comprising the amino acid sequence of SEQ ID NO: 1763, d. CDR-L1 comprising the amino acid sequence of SEQ ID NO: 950, e. CDR-L2 comprising the amino acid sequence of SEQ ID NO: 1492, f. CDR-L3 comprising the amino acid sequence of SEQ ID NO: 2034.

[1923] In one aspect, the present disclosure provides an antibody or antigen-binding fragment thereof comprising a CDR-H3 comprising the amino acid sequence of SEQ ID NO: 1763, and a CDR-L3 comprising the amino acid sequence of SEQ ID NO: 2034.

[1924] In one aspect, the present disclosure provides an antibody or antigen-binding fragment thereof comprising at least one, at least two, or all three VH CDR sequences selected from: a. CDR-H1 comprising the amino acid sequence of SEQ ID NO: 679, b. CDR-H2 comprising the amino acid sequence of SEQ ID NO: 1221, c. CDR-H3 comprising the amino acid sequence of SEQ ID NO: 1763, and a VL comprising the amino acid sequence of SEQ ID NO: 408.

[1925] In one aspect, the present disclosure provides an antibody or antigen-binding fragment thereof comprising at least one, at least two, or all three VL CDR sequences selected from: a. CDR-L1 comprising the amino acid sequence of SEQ ID NO: 950, b. CDR-L2 comprising the amino acid sequence of SEQ ID NO: 1492, c. CDR-L3 comprising the amino acid sequence of SEQ ID NO: 2034, and a VH comprising the amino acid sequence of SEQ ID NO: 137.

[1926] In one aspect, an antibody or antigen-binding fragment thereof is provided, wherein the antibody or antigen-binding fragment thereof comprises a heavy chain variable domain (VH) having at least 90%, 91%, 92%, 93%, 94%, 95%, 96%, 97%, 98%, 99%, or 100% sequence identity to the amino acid sequence SEQ ID NO: 137. In some embodiments, a VH sequence having at least 90%, 91%, 92%, 93%, 94%, 95%, 96%, 97%, 98%, or 99% identity contains substitutions (e.g., conservative substitutions), insertions, or deletions relative to the reference sequence, but an antibody or antigen-binding fragment thereof comprising that sequence retains the ability to bind to same antigen as of the parent (e.g., cancer associated antigen). In some embodiments, a total of 1 to 10 amino acids have been substituted, inserted and/or deleted in the amino acid sequence SEQ ID NO: 137. In some embodiments, substitutions, antigen-binding fragment thereof comprises the VH sequence SEQ ID NO: 137, including one or more post-translational modifications of that sequence. In a particular embodiment, the VH comprises one, two or three CDRs selected from: a. CDR-H1, comprising the amino acid sequence SEQ ID NO: 679, b. CDR-H2, comprising the amino acid sequence SEQ ID NO: 1221, and c. CDR-H3, comprising the amino acid sequence SEQ ID NO: 1763.

[1927] In one aspect, an antibody or antigen-binding fragment thereof is provided, wherein the antibody or antigen-binding fragment thereof comprises a light chain variable domain (VL) having at least 90%, 91%, 92%, 93%, 94%, 95%, 96%, 97%, 98%, 99%, or 100% sequence identity to the amino acid sequence SEQ ID NO: 408. In some embodiments, a VL sequence having at least 90%, 91%, 92%, 93%, 94%, 95%, 96%, 97%, 98%, or 99% identity contains substitutions (e.g., conservative substitutions), insertions, or deletions relative to the reference sequence, but an antibody or antigen-binding fragment thereof comprising that sequence retains the ability to bind to same antigen as the parent (e.g., cancer associated antigen). In some embodiments, a total of 1 to 10 amino acids have been substituted, inserted and/or deleted in the amino acid sequence SEQ ID NO: 408. In some embodiments, the substitutions, insertions, or deletions occur in regions outside the CDRs (e.g., in the FRs). Optionally, the antibody or antigen-binding fragment thereof comprises the VL sequence SEQ ID NO: 408, including one or more post-translational modifications of that sequence. In a particular embodiment, the VL comprises one, two or three CDRs selected from: a. CDR-L1, comprising the amino acid sequence SEQ ID NO: 950, b. CDR-L2, comprising the amino acid sequence SEQ ID NO: 1492, and c. CDR-L3, comprising the amino acid sequence SEQ ID NO: 2034.

[1928] In one aspect, an antibody or antigen-binding fragment thereof is provided, wherein the antibody or antigen-binding fragment thereof comprises a VH as in any of the embodiments provided above, and a VL as in any of the embodiments provided above. In some embodiments, the antibody or antigen-binding fragment thereof comprises the VH amino acid sequence of SEQ ID NO: 137, and the VL amino acid sequence of SEQ ID NO: 408, optionally including post-translational modifications of those sequences.

### TLIV1002

[1929] In one aspect, the present disclosure provides an antibody or antigen-binding fragment thereof comprising at least one or both variable regions selected from: a. VH comprising the amino acid sequence of SEQ ID NO: 138 and b. VL comprising the amino acid sequence of SEQ ID NO: 409.

[1930] In one aspect, the present disclosure provides an antibody or antigen-binding fragment thereof comprising at least one, two, three, four, five, or six CDRs selected from: a. CDR-H1 comprising the amino acid sequence of SEQ ID NO: 680, b. CDR-H2 comprising the amino acid sequence of SEQ ID NO: 1222, c. CDR-H3 comprising the amino acid sequence of SEQ ID NO: 1764, d. CDR-L1 comprising the amino acid sequence of SEQ ID NO: 951, e. CDR-L2 comprising the amino acid sequence of SEQ ID NO: 1493, and f. CDR-L3 comprising the amino acid sequence of SEQ ID NO: 2035.

[1931] In one aspect, the present disclosure provides an antibody or antigen-binding fragment thereof comprising a CDR-H3 comprising the amino acid sequence of SEQ ID NO: 1764, and a CDR-L3 comprising the amino acid sequence of SEQ ID NO: 2035.

[1932] In one aspect, the present disclosure provides an antibody or antigen-binding fragment thereof comprising at least one, at least two, or all three VH CDR sequences selected from: a. CDR-H1 comprising the amino acid sequence of SEQ ID NO: 680, b. CDR-H2 comprising the amino acid sequence of SEQ ID NO: 1222, c. CDR-H3 comprising the amino acid sequence of SEQ ID NO: 1764, and a VL comprising the amino acid sequence of SEQ ID NO: 409.

[1933] In one aspect, the present disclosure provides an antibody or antigen-binding fragment thereof comprising at least one, at least two, or all three VL CDR sequences selected from: a. CDR-L1 comprising the amino acid sequence of SEQ ID NO: 951, b. CDR-L2 comprising the amino acid sequence of SEQ ID NO: 1493, c. CDR-L3 comprising the amino acid sequence of SEQ ID NO: 2035, and a VH comprising the amino acid sequence of SEQ ID NO: 138.

[1934] In one aspect, an antibody or antigen-binding fragment thereof is provided, wherein the antibody or antigen-binding fragment thereof comprises a heavy chain variable domain (VH) having at least 90%, 91%, 92%, 93%, 94%, 95%, 96%, 97%, 98%, 99%, or 100% sequence identity to the amino acid sequence SEQ ID NO: 138. In some embodiments, a VH sequence having at least 90%, 91%, 92%, 93%, 94%, 95%, 96%, 97%, 98%, or 99% identity contains substitutions (e.g., conservative substitutions), insertions, or deletions relative to the reference sequence, but an antibody or antigen-binding fragment thereof comprising that sequence retains the ability to bind to same antigen as of the parent (e.g., cancer associated antigen). In some embodiments, a total of 1 to 10 amino acids have been substituted, inserted and/or deleted in the amino acid sequence SEQ ID NO: 138. In some embodiments, substitutions, insertions, or deletions occur in regions outside the CDRs (e.g., in the FRs). Optionally, the antibody or antigen-binding fragment thereof comprises the VH sequence SEQ ID NO: 138, including one or more post-translational modifications of that sequence. In a particular embodiment, the VH comprises one, two or three CDRs selected from: a. CDR-H1, comprising the amino acid sequence SEQ ID NO: 680, b. CDR-H2, comprising the amino acid sequence SEQ ID NO: 1222, and c. CDR-H3, comprising the amino acid sequence SEQ ID NO: 1764.

[1935] In one aspect, an antibody or antigen-binding fragment thereof is provided, wherein the antibody or antigen-binding fragment thereof comprises a light chain variable domain (VL) having at least 90%, 91%, 92%, 93%, 94%, 95%, 96%, 97%, 98%, 99%, or 100% sequence identity to the amino acid sequence SEQ ID NO: 409. In some embodiments, a VL sequence having at least 90%, 91%, 92%, 93%, 94%, 95%, 96%, 97%, 98%, or 99% identity contains substitutions (e.g., conservative substitutions), insertions, or deletions relative to the reference sequence, but an antibody or antigen-binding fragment thereof comprising that sequence retains the ability to bind to same antigen as the parent (e.g., cancer associated antigen). In some embodiments, a total of 1 to 10 amino acids have been substituted, inserted and/or deleted in the amino acid sequence SEQ ID NO: 409. In some embodiments, the substitutions, insertions, or deletions occur in regions outside the CDRs (e.g., in the FRs). Optionally, the antibody or antigen-binding fragment thereof comprises the VL sequence SEQ ID NO: 409, including one or more post-translational modifications of that sequence. In a particular embodiment, the VL comprises one, two or three CDRs selected from: a. CDR-L1, comprising the amino acid sequence SEQ ID NO: 951, b. CDR-L2, comprising the amino acid sequence SEQ ID NO: 1493, and c. CDR-L3, comprising the amino acid sequence SEQ ID NO: 2035.

[1936] In one aspect, an antibody or antigen-binding fragment thereof is provided, wherein the antibody or antigen-binding fragment thereof comprises a VH as in any of the embodiments provided above, and a VL as in any of the embodiments provided above. In some embodiments, the antibody or antigen-binding fragment thereof comprises the VH amino acid sequence of SEQ ID NO: 138, and the VL amino acid sequence of SEQ ID NO: 409, optionally including post-translational modifications of those sequences.

### TLIV1003

[1937] In one aspect, the present disclosure provides an antibody or antigen-binding fragment thereof comprising at least one or both variable regions selected from: a. VH comprising the amino acid sequence of SEQ ID NO: 139 and b. VL comprising the amino acid sequence of SEQ ID NO: 410.

[1938] In one aspect, the present disclosure provides an antibody or antigen-binding fragment thereof comprising at least one, two, three, four, five, or six CDRs selected from: a. CDR-H1 comprising the amino acid sequence of SEQ ID NO: 681, b. CDR-H2 comprising the amino acid sequence of SEQ ID NO: 1223, c. CDR-H3 comprising the amino acid sequence of SEQ ID NO: 1765, d. CDR-L1 comprising the amino acid sequence of SEQ ID NO: 952, e. CDR-L2 comprising the amino acid sequence of SEQ ID NO: 1494, and f. CDR-L3 comprising the amino acid sequence of SEQ ID NO: 2036.

[1939] In one aspect, the present disclosure provides an antibody or antigen-binding fragment thereof comprising a CDR-H3 and a CDR-L3 comprising the amino acid sequence of SEQ ID NO: 2036.

[1940] In one aspect, the present disclosure provides an antibody or antigen-binding fragment thereof comprising at least one, at least two, or all three VH CDR sequences selected from: a. CDR-H1 comprising the amino acid sequence of SEQ ID NO: 681, b. CDR-H2 comprising the amino acid sequence of SEQ ID NO: 1223, c. CDR-H3 comprising the amino acid sequence of SEQ ID NO: 1765, and a VL comprising the amino acid sequence of SEQ ID NO: 410.

[1941] In one aspect, the present disclosure provides an antibody or antigen-binding fragment thereof comprising at least one, at least two, or all three VL CDR sequences selected from: a. CDR-L1 comprising the amino acid sequence of SEQ ID NO: 952, b. CDR-L2 comprising the amino acid sequence of SEQ ID NO: 1494, c. CDR-L3 comprising the amino acid sequence of SEQ ID NO: 2036, and a VH comprising the amino acid sequence of SEQ ID NO: 139.

[1942] In one aspect, an antibody or antigen-binding fragment thereof is provided, wherein the antibody or antigen-binding fragment thereof comprises a heavy chain variable domain (VH) having at least 90%, 91%, 92%, 93%, 94%, 95%, 96%, 97%, 98%, 99%, or 100% sequence identity to the amino acid sequence SEQ ID NO: 139. In some embodiments, a VH sequence having at least 90%, 91%, 92%, 93%, 94%, 95%, 96%, 97%, 98%, or 99% identity contains substitutions (e.g., conservative substitutions), insertions, or deletions relative to the reference sequence, but an antibody or antigen-binding fragment thereof comprising that sequence retains the ability to bind to same antigen as of the parent (e.g., cancer associated antigen). In some embodiments, a total of 1 to 10 amino acids have been substituted, inserted and/or deleted in the amino acid sequence SEQ ID NO: 139. In some embodiments, substitutions, insertions, or deletions occur in regions outside the CDRs (e.g., in the FRs). Optionally, the antibody or antigen-binding fragment thereof comprises the VH sequence SEQ ID NO: 139, including one or more post-translational modifications of that sequence. In a particular embodiment, the VH comprises one, two or three CDRs selected from: a. CDR-H1, comprising the amino acid sequence SEQ ID NO: 681, b. CDR-H2, comprising the amino acid sequence SEQ ID NO: 1223, and c. CDR-H3, comprising the amino acid sequence SEQ ID NO: 1765.

[1943] In one aspect, an antibody or antigen-binding fragment thereof is provided, wherein the antibody or antigen-binding fragment thereof comprises a light chain variable domain (VL) having at least 90%, 91%, 92%, 93%, 94%, 95%, 96%, 97%, 98%, 99%, or 100% sequence identity to the amino acid sequence SEQ ID NO: 410. In some embodiments, a VL sequence having at least 90%, 91%, 92%, 93%, 94%, 95%, 96%, 97%, 98%, or 99% identity contains substitutions (e.g., conservative substitutions), insertions, or deletions relative to the reference sequence, but an antibody or antigen-binding fragment thereof comprising that sequence retains the ability to bind to same antigen as the parent (e.g., cancer associated antigen). In some embodiments, a total of 1 to 10 amino acids have been substituted, inserted and/or deleted in the amino acid sequence SEQ ID NO: 410. In some embodiments, the substitutions, insertions, or deletions occur in regions outside the CDRs (e.g., in the FRs). Optionally, the antibody or antigen-binding fragment thereof comprises the VL sequence SEQ ID NO: 410, including one or more post-translational modifications of that sequence. In a particular embodiment, the VL comprises one, two or three CDRs selected from: a. CDR-L1, comprising the amino acid sequence SEQ ID NO: 952, b. CDR-L2, comprising the amino acid sequence SEQ ID NO: 1494, and c. CDR-L3, comprising the amino acid sequence SEQ ID NO: 2036.

[1944] In one aspect, an antibody or antigen-binding fragment thereof is provided, wherein the antibody or antigen-binding fragment thereof comprises a VH as in any of the embodiments provided above, and a VL as in any of the embodiments provided above. In some embodiments, the antibody or antigen-binding fragment thereof comprises the VH amino acid sequence of SEQ ID NO: 139, and the VL amino acid sequence of SEQ ID NO: 410, optionally including post-translational modifications of those sequences.

### TLIV1004

[1945] In one aspect, the present disclosure provides an antibody or antigen-binding fragment thereof comprising at least one or both variable regions selected from: a. VH comprising the amino acid sequence of SEQ ID NO: 140 and a VL comprising the amino acid sequence of SEQ ID NO: 411.

[1946] In one aspect, the present disclosure provides an antibody or antigen-binding fragment thereof comprising at least one, two, three, four, five, or six CDRs selected from: a. CDR-H1 comprising the amino acid sequence of SEQ ID NO: 682, b. CDR-H2 comprising the amino acid sequence of SEQ ID NO: 1224, c. CDR-H3 comprising the amino acid sequence of SEQ ID NO: 1766, d. CDR-L1 comprising the amino acid sequence of SEQ ID NO: 953, e. CDR-L2 comprising the amino acid sequence of SEQ ID NO: 1495, and f. CDR-L3 comprising the amino acid sequence of SEQ ID NO: 2037.

[1947] In one aspect, the present disclosure provides an antibody or antigen-binding fragment thereof comprising a CDR-H3 comprising the amino acid sequence of SEQ ID NO: 1766, and a CDR-L3 comprising the amino acid sequence of SEQ ID NO: 2037.

[1948] In one aspect, the present disclosure provides an antibody or antigen-binding fragment thereof comprising at least one, at least two, or all three VH CDR sequences selected from: a. CDR-H1 comprising the amino acid sequence of SEQ ID NO: 682, b. CDR-H2 comprising the amino acid sequence of SEQ ID NO: 1224, c. CDR-H3 comprising the amino acid sequence of SEQ ID NO: 1766, and a VL comprising the amino acid sequence of SEQ ID NO: 411.

[1949] In one aspect, the present disclosure provides an antibody or antigen-binding fragment thereof comprising at least one, at least two, or all three VL CDR sequences selected from: a. CDR-L1 comprising the amino acid sequence of SEQ ID NO: 953, b. CDR-L2 comprising the amino acid sequence of SEQ ID NO: 1495, c. CDR-L3 comprising the amino acid sequence of SEQ ID NO: 2037, and a VH comprising the amino acid sequence of SEQ ID NO: 140.

[1950] In one aspect, an antibody or antigen-binding fragment thereof is provided, wherein the antibody or antigen-binding fragment thereof comprises a heavy chain variable domain (VH) having at least 90%, 91%, 92%, 93%, 94%, 95%, 96%, 97%, 98%, 99%, or 100% sequence identity to the amino acid sequence SEQ ID NO: 140. In some embodiments, a VH sequence having at least 90%, 91%, 92%, 93%, 94%, 95%, 96%, 97%, 98%, or 99% identity contains substitutions (e.g., conservative substitutions), insertions, or deletions relative to the reference sequence, but an antibody or antigen-binding fragment thereof comprising that sequence retains the ability to bind to same antigen as of the parent (e.g., cancer associated antigen). In some embodiments, a total of 1 to 10 amino acids have been substituted, inserted and/or deleted in the amino acid sequence SEQ ID NO: 140. In some embodiments, substitutions, insertions, or deletions occur in regions outside the CDRs (e.g., in the FRs). Optionally, the antibody or antigen-binding fragment thereof comprises the VH sequence SEQ ID NO: 140, including one or more post-translational modifications of that sequence. In a particular embodiment, the VH comprises one, two or three CDRs selected from: a. CDR-H1, comprising the amino acid sequence SEQ ID NO: 682, b. CDR-H2, comprising the amino acid sequence SEQ ID NO: 1224, and c. CDR-H3, comprising the amino acid sequence SEQ ID NO: 1766.

[1951] In one aspect, an antibody or antigen-binding fragment thereof is provided, wherein the antibody or antigen-binding fragment thereof comprises a light chain variable domain (VL) having at least 90%, 91%, 92%, 93%, 94%, 95%, 96%, 97%, 98%, 99%, or 100% sequence identity to the amino acid sequence SEQ ID NO: 411. In some embodiments, a VL sequence having at least 90%, 91%, 92%, 93%, 94%, 95%, 96%, 97%, 98%, or 99% identity contains substitutions (e.g., conservative substitutions), insertions, or deletions relative to the reference sequence, but an antibody or antigen-binding fragment thereof comprising that sequence retains the ability to bind to same antigen as the parent (e.g., cancer associated antigen). In some embodiments, a total of 1 to 10 amino acids have been substituted, inserted and/or deleted in the amino acid sequence SEQ ID NO: 411. In some embodiments, the substitutions, antigen-binding fragment thereof comprises the VL sequence SEQ ID NO: 411, including one or more post-translational modifications of that sequence. In a particular embodiment, the VL comprises one, two or three CDRs selected from: a. CDR-L1, comprising the amino acid sequence SEQ ID NO: 953, b. CDR-L2, comprising the amino acid sequence SEQ ID NO: 1495, and c. CDR-L3, comprising the amino acid sequence SEQ ID NO: 2037.

[1952] In one aspect, an antibody or antigen-binding fragment thereof is provided, wherein the antibody or antigen-binding fragment thereof comprises a VH as in any of the embodiments provided above, and a VL as in any of the embodiments provided above. In some embodiments, the antibody or antigen-binding fragment thereof comprises the VH amino acid sequence of SEQ ID NO: 140, and the VL amino acid sequence of SEQ ID NO: 411, optionally including post-translational modifications of those sequences.

### TLUA1001

[1953] In one aspect, the present disclosure provides an antibody or antigen-binding fragment thereof comprising at least one or both variable regions selected from: a. VH comprising the amino acid sequence of SEQ ID NO: 141 and b. VL comprising the amino acid sequence of SEQ ID NO: 412.

[1954] In one aspect, the present disclosure provides an antibody or antigen-binding fragment thereof comprising at least one, two, three, four, five, or six CDRs selected from: a. CDR-H1 comprising the amino acid sequence of SEQ ID NO: 683, b. CDR-H2 comprising the amino acid sequence of SEQ ID NO: 1225, c. CDR-H3 comprising the amino acid sequence of SEQ ID NO: 1767, d. CDR-L1 comprising the amino acid sequence of SEQ ID NO: 954, e. CDR-L2 comprising the amino acid sequence of SEQ ID NO: 1496, and f. CDR-L3 comprising the amino acid sequence of SEQ ID NO: 2038.

[1955] In one aspect, the present disclosure provides an antibody or antigen-binding fragment thereof comprising a CDR-H3 comprising the amino acid sequence of SEQ ID NO: 1767, and a CDR-L3 comprising the amino acid sequence of SEQ ID NO: 2038.

[1956] In one aspect, the present disclosure provides an antibody or antigen-binding fragment thereof comprising at least one, at least two, or all three VH CDR sequences selected from: a. CDR-H1 comprising the amino acid sequence of SEQ ID NO: 683, b. CDR-H2 comprising the amino acid sequence of SEQ ID NO: 1225, c. CDR-H3 comprising the amino acid sequence of SEQ ID NO: 1767, and a VL comprising the amino acid sequence of SEQ ID NO: 412.

[1957] In one aspect, the present disclosure provides an antibody or antigen-binding fragment thereof comprising at least one, at least two, or all three VL CDR sequences selected from: a. CDR-L1 comprising the amino acid sequence of SEQ ID NO: 954, b. CDR-L2 comprising the amino acid sequence of SEQ ID NO: 1496, c. CDR-L3 comprising the amino acid sequence of SEQ ID NO: 2038, and a VH comprising the amino acid sequence of SEQ ID NO: 141.

[1958] In one aspect, an antibody or antigen-binding fragment thereof is provided, wherein the antibody or antigen-binding fragment thereof comprises a heavy chain variable domain (VH) having at least 90%, 91%, 92%, 93%, 94%, 95%, 96%, 97%, 98%, 99%, or 100% sequence identity to the amino acid sequence SEQ ID NO: 141. In some embodiments, a VH sequence having at least 90%, 91%, 92%, 93%, 94%, 95%, 96%, 97%, 98%, or 99% identity contains substitutions (e.g., conservative substitutions), thereof comprising that sequence retains the ability to bind to same antigen as of the parent (e.g., cancer associated antigen). In some embodiments, a total of 1 to 10 amino acids have been substituted, inserted and/or deleted in the amino acid sequence SEQ ID NO: 141. In some embodiments, substitutions, insertions, or deletions occur in regions outside the CDRs (e.g., in the FRs). Optionally, the antibody or antigen-binding fragment thereof comprises the VH sequence SEQ ID NO: 141, including one or more post-translational modifications of that sequence. In a particular embodiment, the VH comprises one, two or three CDRs selected from: a. CDR-H1, comprising the amino acid sequence SEQ ID NO: 683, b. CDR-H2, comprising the amino acid sequence SEQ ID NO: 1225, and c. CDR-H3, comprising the amino acid sequence SEQ ID NO: 1767.

[1959] In one aspect, an antibody or antigen-binding fragment thereof is provided, wherein the antibody or antigen-binding fragment thereof comprises a light chain variable domain (VL) having at least 90%, 91%, 92%, 93%, 94%, 95%, 96%, 97%, 98%, 99%, or 100% sequence identity to the amino acid sequence SEQ ID NO: 412. In some embodiments, a VL sequence having at least 90%, 91%, 92%, 93%, 94%, 95%, 96%, 97%, 98%, or 99% identity contains substitutions (e.g., conservative substitutions), insertions, or deletions relative to the reference sequence, but an antibody or antigen-binding fragment thereof comprising that sequence retains the ability to bind to same antigen as the parent (e.g., cancer associated antigen). In some embodiments, a total of 1 to 10 amino acids have been substituted, inserted and/or deleted in the amino acid sequence SEQ ID NO: 412. In some embodiments, the substitutions, insertions, or deletions occur in regions outside the CDRs (e.g., in the FRs). Optionally, the antibody or antigen-binding fragment thereof comprises the VL sequence SEQ ID NO: 412, including one or more post-translational modifications of that sequence. In a particular embodiment, the VL comprises one, two or three CDRs selected from: a. CDR-L1, comprising the amino acid sequence SEQ ID NO: 954, b. CDR-L2, comprising the amino acid sequence SEQ ID NO: 1496, and c. CDR-L3, comprising the amino acid sequence SEQ ID NO: 2038.

[1960] In one aspect, an antibody or antigen-binding fragment thereof is provided, wherein the antibody or antigen-binding fragment thereof comprises a VH as in any of the embodiments provided above, and a VL as in any of the embodiments provided above. In some embodiments, the antibody or antigen-binding fragment thereof comprises the VH amino acid sequence of SEQ ID NO: 141, and the VL amino acid sequence of SEQ ID NO: 412, optionally including post-translational modifications of those sequences.

### TLUA1002

[1961] In one aspect, the present disclosure provides an antibody or antigen-binding fragment thereof comprising at least one or both variable regions selected from: a. VH comprising the amino acid sequence of SEQ ID NO: 142 and b. VL comprising the amino acid sequence of SEQ ID NO: 413.

[1962] In one aspect, the present disclosure provides an antibody or antigen-binding fragment thereof comprising at least one, two, three, four, five, or six CDRs selected from: a. CDR-H1 comprising the amino acid sequence of SEQ ID NO: 684, b. CDR-H2 comprising the amino acid sequence of SEQ ID NO: 1226, c. CDR-H3 comprising the amino acid sequence of SEQ ID NO: 1768, d. CDR-L1 comprising the amino acid sequence of SEQ ID NO: 955, e. CDR-L2 comprising the amino acid sequence of SEQ ID NO: 1497, and f. CDR-L3 comprising the amino acid sequence of SEQ ID NO: 2039.

[1963] In one aspect, the present disclosure provides an antibody or antigen-binding fragment thereof comprising a CDR-H3 comprising the amino acid sequence of SEQ ID NO: 1768, and a CDR-L3 comprising the amino acid sequence of SEQ ID NO: 2039.

[1964] In one aspect, the present disclosure provides an antibody or antigen-binding fragment thereof comprising at least one, at least two, or all three VH CDR sequences selected from: a. CDR-H1 comprising the amino acid sequence of SEQ ID NO: 684, b. CDR-H2 comprising the amino acid sequence of SEQ ID NO: 1226, c. CDR-H3 comprising the amino acid sequence of SEQ ID NO: 1768, and a VL comprising the amino acid sequence of SEQ ID NO: 413.

[1965] In one aspect, the present disclosure provides an antibody or antigen-binding fragment thereof comprising at least one, at least two, or all three VL CDR sequences selected from: a. CDR-L1 comprising the amino acid sequence of SEQ ID NO: 955, b. CDR-L2 comprising the amino acid sequence of SEQ ID NO: 1497, c. CDR-L3 comprising the amino acid sequence of SEQ ID NO: 2039, and a VH comprising the amino acid sequence of SEQ ID NO: 142.

[1966] In one aspect, an antibody or antigen-binding fragment thereof is provided, wherein the antibody or antigen-binding fragment thereof comprises a heavy chain variable domain (VH) having at least 90%, 91%, 92%, 93%, 94%, 95%, 96%, 97%, 98%, 99%, or 100% sequence identity to the amino acid sequence SEQ ID NO: 142. In some embodiments, a VH sequence having at least 90%, 91%, 92%, 93%, 94%, 95%, 96%, 97%, 98%, or 99% identity contains substitutions (e.g., conservative substitutions), insertions, or deletions relative to the reference sequence, but an antibody or antigen-binding fragment thereof comprising that sequence retains the ability to bind to same antigen as of the parent (e.g., cancer associated antigen). In some embodiments, a total of 1 to 10 amino acids have been substituted, inserted and/or deleted in the amino acid sequence SEQ ID NO: 142. In some embodiments, substitutions, insertions, or deletions occur in regions outside the CDRs (e.g., in the FRs). Optionally, the antibody or antigen-binding fragment thereof comprises the VH sequence SEQ ID NO: 142, including one or more post-translational modifications of that sequence. In a particular embodiment, the VH comprises one, two or three CDRs selected from: a. CDR-H1, comprising the amino acid sequence SEQ ID NO: 684, b. CDR-H2, comprising the amino acid sequence SEQ ID NO: 1226, and c. CDR-H3, comprising the amino acid sequence SEQ ID NO: 1768.

[1967] In one aspect, an antibody or antigen-binding fragment thereof is provided, wherein the antibody or antigen-binding fragment thereof comprises a light chain variable domain (VL) having at least 90%, 91%, 92%, 93%, 94%, 95%, 96%, 97%, 98%, 99%, or 100% sequence identity to the amino acid sequence SEQ ID NO: 413. In some embodiments, a VL sequence having at least 90%, 91%, 92%, 93%, 94%, 95%, 96%, 97%, 98%, or 99% identity contains substitutions (e.g., conservative substitutions), insertions, or deletions relative to the reference sequence, but an antibody or antigen-binding fragment thereof comprising that sequence retains the ability to bind to same antigen as the parent (e.g., cancer associated antigen). In some embodiments, a total of 1 to 10 amino acids have been substituted, inserted and/or deleted in the amino acid sequence SEQ ID NO: 413. In some embodiments, the substitutions, insertions, or deletions occur in regions outside the CDRs (e.g., in the FRs). Optionally, the antibody or antigen-binding fragment thereof comprises the VL sequence SEQ ID NO: 413, including one or more post-translational modifications of that sequence. In a particular embodiment, the VL comprises one, two or three CDRs selected from: a. CDR-L1, comprising the amino acid sequence SEQ ID NO: 955, b. CDR-L2, comprising the amino acid sequence SEQ ID NO: 1497, and c. CDR-L3, comprising the amino acid sequence SEQ ID NO: 2039.

[1968] In one aspect, an antibody or antigen-binding fragment thereof is provided, wherein the antibody or antigen-binding fragment thereof comprises a VH as in any of the embodiments provided above, and a VL as in any of the embodiments provided above. In some embodiments, the antibody or antigen-binding fragment thereof comprises the VH amino acid sequence of SEQ ID NO: 142, and the VL amino acid sequence of SEQ ID NO: 413, optionally including post-translational modifications of those sequences.

### TLUA1003

[1969] In one aspect, the present disclosure provides an antibody or antigen-binding fragment thereof comprising at least one or both variable regions selected from: a. VH comprising the amino acid sequence of SEQ ID NO: 143 and b. VL comprising the amino acid sequence of SEQ ID NO: 414.

[1970] In one aspect, the present disclosure provides an antibody or antigen-binding fragment thereof comprising at least one, two, three, four, five, or six CDRs selected from: a. CDR-H1 comprising the amino acid sequence of SEQ ID NO: 685, b. CDR-H2 comprising the amino acid sequence of SEQ ID NO: 1227, c. CDR-H3 comprising the amino acid sequence of SEQ ID NO: 1769, d. CDR-L1 comprising the amino acid sequence of SEQ ID NO: 956, e. CDR-L2 comprising the amino acid sequence of SEQ ID NO: 1498, and f. CDR-L3 comprising the amino acid sequence of SEQ ID NO: 2040.

[1971] In one aspect, the present disclosure provides an antibody or antigen-binding fragment thereof comprising a CDR-H3 comprising the amino acid sequence of SEQ ID NO: 1769, and a CDR-L3 comprising the amino acid sequence of SEQ ID NO: 2040.

[1972] In one aspect, the present disclosure provides an antibody or antigen-binding fragment thereof comprising at least one, at least two, or all three VH CDR sequences selected from: a. CDR-H1 comprising the amino acid sequence of SEQ ID NO: 685, b. CDR-H2 comprising the amino acid sequence of SEQ ID NO: 1227, c. CDR-H3 comprising the amino acid sequence of SEQ ID NO: 1769, and a VL comprising the amino acid sequence of SEQ ID NO: 414.

[1973] In one aspect, the present disclosure provides an antibody or antigen-binding fragment thereof comprising at least one, at least two, or all three VL CDR sequences selected from: a. CDR-L1 comprising the amino acid sequence of SEQ ID NO: 956, b. CDR-L2 comprising the amino acid sequence of SEQ ID NO: 1498, c. CDR-L3 comprising the amino acid sequence of SEQ ID NO: 2040, and a VH comprising the amino acid sequence of SEQ ID NO: 143.

[1974] In one aspect, an antibody or antigen-binding fragment thereof is provided, wherein the antibody or antigen-binding fragment thereof comprises a heavy chain variable domain (VH) having at least 90%, 91%, 92%, 93%, 94%, 95%, 96%, 97%, 98%, 99%, or 100% sequence identity to the amino acid sequence SEQ ID NO: 143. In some embodiments, a VH sequence having at least 90%, 91%, 92%, 93%, 94%, 95%, 96%, 97%, 98%, or 99% identity contains substitutions (e.g., conservative substitutions), insertions, or deletions relative to the reference sequence, but an antibody or antigen-binding fragment thereof comprising that sequence retains the ability to bind to same antigen as of the parent (e.g., cancer associated antigen). In some embodiments, a total of 1 to 10 amino acids have been substituted, inserted and/or deleted in the amino acid sequence SEQ ID NO: 143. In some embodiments, substitutions, insertions, or deletions occur in regions outside the CDRs (e.g., in the FRs). Optionally, the antibody or antigen-binding fragment thereof comprises the VH sequence SEQ ID NO: 143, including one or more post-translational modifications of that sequence. In a particular embodiment, the VH comprises one, two or three CDRs selected from: a. CDR-H1, comprising the amino acid sequence SEQ ID NO: 685, b. CDR-H2, comprising the amino acid sequence SEQ ID NO: 1227, and c. CDR-H3, comprising the amino acid sequence SEQ ID NO: 1769.

[1975] In one aspect, an antibody or antigen-binding fragment thereof is provided, wherein the antibody or antigen-binding fragment thereof comprises a light chain variable domain (VL) having at least 90%, 91%, 92%, 93%, 94%, 95%, 96%, 97%, 98%, 99%, or 100% sequence identity to the amino acid sequence SEQ ID NO: 414. In some embodiments, a VL sequence having at least 90%, 91%, 92%, 93%, 94%, 95%, 96%, 97%, 98%, or 99% identity contains substitutions (e.g., conservative substitutions), insertions, or deletions relative to the reference sequence, but an antibody or antigen-binding fragment thereof comprising that sequence retains the ability to bind to same antigen as the parent (e.g., cancer associated antigen). In some embodiments, a total of 1 to 10 amino acids have been substituted, inserted and/or deleted in the amino acid sequence SEQ ID NO: 414. In some embodiments, the substitutions, insertions, or deletions occur in regions outside the CDRs (e.g., in the FRs). Optionally, the antibody or antigen-binding fragment thereof comprises the VL sequence SEQ ID NO: 414, including one or more post-translational modifications of that sequence. In a particular embodiment, the VL comprises one, two or three CDRs selected from: a. CDR-L1, comprising the amino acid sequence SEQ ID NO: 956, b. CDR-L2, comprising the amino acid sequence SEQ ID NO: 1498, and c. CDR-L3, comprising the amino acid sequence SEQ ID NO: 2040.

[1976] In one aspect, an antibody or antigen-binding fragment thereof is provided, wherein the antibody or antigen-binding fragment thereof comprises a VH as in any of the embodiments provided above, and a VL as in any of the embodiments provided above. In some embodiments, the antibody or antigen-binding fragment thereof comprises the VH amino acid sequence of SEQ ID NO: 143, and the VL amino acid sequence of SEQ ID NO: 414, optionally including post-translational modifications of those sequences.

### TLUA1004

[1977] In one aspect, the present disclosure provides an antibody or antigen-binding fragment thereof comprising at least one or both variable regions selected from: a. VH comprising the amino acid sequence of SEQ ID NO: 144 and b. VL comprising the amino acid sequence of SEQ ID NO: 415.

[1978] In one aspect, the present disclosure provides an antibody or antigen-binding fragment thereof comprising at least one, two, three, four, five, or six CDRs selected from: a. CDR-H1 comprising the amino acid sequence of SEQ ID NO: 686, b. CDR-H2 comprising the amino acid sequence of SEQ ID NO: 1228, c. CDR-H3 comprising the amino acid sequence of SEQ ID NO: 1770, d. CDR-L1 comprising the amino acid sequence of SEQ ID NO: 957, e. CDR-L2 comprising the amino acid sequence of SEQ ID NO: 1499, and f. CDR-L3 comprising the amino acid sequence of SEQ ID NO: 2041.

[1979] In one aspect, the present disclosure provides an antibody or antigen-binding fragment thereof comprising a CDR-H3 comprising the amino acid sequence of SEQ ID NO: 1770, and a CDR-L3 comprising the amino acid sequence of SEQ ID NO: 2041.

[1980] In one aspect, the present disclosure provides an antibody or antigen-binding fragment thereof comprising at least one, at least two, or all three VH CDR sequences selected from: a. CDR-H1 comprising the amino acid sequence of SEQ ID NO: 686, b. CDR-H2 comprising the amino acid sequence of SEQ ID NO: 1228, c. CDR-H3 comprising the amino acid sequence of SEQ ID NO: 1770, and a VL comprising the amino acid sequence of SEQ ID NO: 415.

[1981] In one aspect, the present disclosure provides an antibody or antigen-binding fragment thereof comprising at least one, at least two, or all three VL CDR sequences selected from: a. CDR-L1 comprising the amino acid sequence of SEQ ID NO: 957, b. CDR-L2 comprising the amino acid sequence of SEQ ID NO: 1499, c. CDR-L3 comprising the amino acid sequence of SEQ ID NO: 2041, and a VH comprising the amino acid sequence of SEQ ID NO: 144.

[1982] In one aspect, an antibody or antigen-binding fragment thereof is provided, wherein the antibody or antigen-binding fragment thereof comprises a heavy chain variable domain (VH) having at least 90%, 91%, 92%, 93%, 94%, 95%, 96%, 97%, 98%, 99%, or 100% sequence identity to the amino acid sequence SEQ ID NO: 144. In some embodiments, a VH sequence having at least 90%, 91%, 92%, 93%, 94%, 95%, 96%, 97%, 98%, or 99% identity contains substitutions (e.g., conservative substitutions), insertions, or deletions relative to the reference sequence, but an antibody or antigen-binding fragment thereof comprising that sequence retains the ability to bind to same antigen as of the parent (e.g., cancer associated antigen). In some embodiments, a total of 1 to 10 amino acids have been substituted, inserted and/or deleted in the amino acid sequence SEQ ID NO: 144. In some embodiments, substitutions, insertions, or deletions occur in regions outside the CDRs (e.g., in the FRs). Optionally, the antibody or antigen-binding fragment thereof comprises the VH sequence SEQ ID NO: 144, including one or more post-translational modifications of that sequence. In a particular embodiment, the VH comprises one, two or three CDRs selected from: a. CDR-H1, comprising the amino acid sequence SEQ ID NO: 686, b. CDR-H2, comprising the amino acid sequence SEQ ID NO: 1228, and c. CDR-H3, comprising the amino acid sequence SEQ ID NO: 1770.

[1983] In one aspect, an antibody or antigen-binding fragment thereof is provided, wherein the antibody or antigen-binding fragment thereof comprises a light chain variable domain (VL) having at least 90%, 91%, 92%, 93%, 94%, 95%, 96%, 97%, 98%, 99%, or 100% sequence identity to the amino acid sequence SEQ ID NO: 415. In some embodiments, a VL sequence having at least 90%, 91%, 92%, 93%, 94%, 95%, 96%, 97%, 98%, or 99% identity contains substitutions (e.g., conservative substitutions), thereof comprising that sequence retains the ability to bind to same antigen as the parent (e.g., cancer associated antigen). In some embodiments, a total of 1 to 10 amino acids have been substituted, inserted and/or deleted in the amino acid sequence SEQ ID NO: 415. In some embodiments, the substitutions, insertions, or deletions occur in regions outside the CDRs (e.g., in the FRs). Optionally, the antibody or antigen-binding fragment thereof comprises the VL sequence SEQ ID NO: 415, including one or more post-translational modifications of that sequence. In a particular embodiment, the VL comprises one, two or three CDRs selected from: a. CDR-L1, comprising the amino acid sequence SEQ ID NO: 957, b. CDR-L2, comprising the amino acid sequence SEQ ID NO: 1499, and c. CDR-L3, comprising the amino acid sequence SEQ ID NO: 2041.

[1984] In one aspect, an antibody or antigen-binding fragment thereof is provided, wherein the antibody or antigen-binding fragment thereof comprises a VH as in any of the embodiments provided above, and a VL as in any of the embodiments provided above. In some embodiments, the antibody or antigen-binding fragment thereof comprises the VH amino acid sequence of SEQ ID NO: 144, and the VL amino acid sequence of SEQ ID NO: 415, optionally including post-translational modifications of those sequences.

[1985] TLUA1005

[1986] In one aspect, the present disclosure provides an antibody or antigen-binding fragment thereof comprising at least one or both variable regions selected from: a. VH comprising the amino acid sequence of SEQ ID NO: 145, and b. VL comprising the amino acid sequence of SEQ ID NO: 416.

[1987] In one aspect, the present disclosure provides an antibody or antigen-bindin g fragment thereof comprising at least one, two, three, four, five, or six CDRs selected from: a. CDR-H1 comprising the amino acid sequence of SEQ ID NO: 687, b. CDR-H2 comprising the amino acid sequence of SEQ ID NO: 1229, c. CDR-H3 comprising the amino acid sequence of SEQ ID NO: 1771, d. CDR-L1 comprising the amino acid sequence of SEQ ID NO: 958, e. CDR-L2 comprising the amino acid sequence of SEQ ID NO: 1500, and f. CDR-L3 comprising the amino acid sequence of SEQ ID NO: 2042.

[1988] In one aspect, the present disclosure provides an antibody or antigen-bindin g fragment thereof comprising a CDR-H3 comprising the amino acid sequence of SEQ ID NO: 1771, and a CDR-L3 comprising the amino acid sequence of SEQ ID NO: 2042.

[1989] In one aspect, the present disclosure provides an antibody or antigen-binding fragment thereof comprising at least one, at least two, or all three VH CDR sequences selected from: a. CDR-H1 comprising the amino acid sequence of SEQ ID NO: 687, b. CDR-H2 comprising the amino acid sequence of SEQ ID NO: 1229, c. CDR-H3 comprising the amino acid sequence of SEQ ID NO: 1771, and a VL comprising the amino acid sequence of SEQ ID NO: 416.

[1990] In one aspect, the present disclosure provides an antibody or antigen-binding fragment thereof comprising at least one, at least two, or all three VL CDR sequences selected from: a. CDR-L1 comprising the amino acid sequence of SEQ ID NO: 958, b. CDR-L2 comprising the amino acid sequence of SEQ ID NO: 1500, c. CDR-L3 comprising the amino acid sequence of SEQ ID NO: 2042, and a VH comprising the amino acid sequence of SEQ ID NO: 145.

[1991] In one aspect, an antibody or antigen-binding fragment thereof is provided, wherein the antibody or antigen-binding fragment thereof comprises a heavy chain variable domain (VH) having at least 90%, 91%, 92%, 93%, 94%, 95%, 96%, 97%, 98%, 99%, or 100% sequence identity to the amino acid sequence SEQ ID NO: 145. In some embodiments, a VH sequence having at least 90%, 91%, 92%, 93%, 94%, 95%, 96%, 97%, 98%, or 99% identity contains substitutions (e.g., conservative substitutions), insertions, or deletions relative to the reference sequence, but an antibody or antigen-binding fragment thereof comprising that sequence retains the ability to bind to same antigen as of the parent (e.g., cancer associated antigen). In some embodiments, a total of 1 to 10 amino acids have been substituted, inserted and/or deleted in the amino acid sequence SEQ ID NO: 145. In some embodiments, substitutions, insertions, or deletions occur in regions outside the CDRs (e.g., in the FRs). Optionally, the antibody or antigen-binding fragment thereof comprises the VH sequence SEQ ID NO: 145, including one or more post-translational modifications of that sequence. In a particular embodiment, the VH comprises one, two or three CDRs selected from: a. CDR-H1, comprising the amino acid sequence SEQ ID NO: 687, b. CDR-H2, comprising the amino acid sequence SEQ ID NO: 1229, and c. CDR-H3, comprising the amino acid sequence SEQ ID NO: 1771.

[1992] In one aspect, an antibody or antigen-binding fragment thereof is provided, wherein the antibody or antigen-binding fragment thereof comprises a light chain variable domain (VL) having at least 90%, 91%, 92%, 93%, 94%, 95%, 96%, 97%, 98%, 99%, or 100% sequence identity to the amino acid sequence SEQ ID NO: 416. In some embodiments, a VL sequence having at least 90%, 91%, 92%, 93%, 94%, 95%, 96%, 97%, 98%, or 99% identity contains substitutions (e.g., conservative substitutions), insertions, or deletions relative to the reference sequence, but an antibody or antigen-binding fragment thereof comprising that sequence retains the ability to bind to same antigen as the parent (e.g., cancer associated antigen). In some embodiments, a total of 1 to 10 amino acids have been substituted, inserted and/or deleted in the amino acid sequence SEQ ID NO: 416. In some embodiments, the substitutions, insertions, or deletions occur in regions outside the CDRs (e.g., in the FRs). Optionally, the antibody or antigen-binding fragment thereof comprises the VL sequence SEQ ID NO: 416, including one or more post-translational modifications of that sequence. In a particular embodiment, the VL comprises one, two or three CDRs selected from: a. CDR-L1, comprising the amino acid sequence SEQ ID NO: 958, b. CDR-L2, comprising the amino acid sequence SEQ ID NO: 1500, and c. CDR-L3, comprising the amino acid sequence SEQ ID NO: 2042.

[1993] In one aspect, an antibody or antigen-binding fragment thereof is provided, wherein the antibody or antigen-binding fragment thereof comprises a VH as in any of the embodiments provided above, and a VL as in any of the embodiments provided above. In some embodiments, the antibody or antigen-binding fragment thereof comprises the VH amino acid sequence of SEQ ID NO: 145, and the VL amino acid sequence of SEQ ID NO: 416, optionally including post-translational modifications of those sequences.

### TLUA1006

[1994] In one aspect, the present disclosure provides an antibody or antigen-binding fragment thereof comprising at least one or both variable regions selected from: a. VH comprising the amino acid sequence of SEQ ID NO: 146 and b. VL comprising the amino acid sequence of SEQ ID NO: 417.

[1995] In one aspect, the present disclosure provides an antibody or antigen-binding fragment thereof comprising at least one, two, three, four, five, or six CDRs selected from: a. CDR-H1 comprising the amino acid sequence of SEQ ID NO: 688, b. CDR-H2 comprising the amino acid sequence of SEQ ID NO: 1230, c. CDR-H3 comprising the amino acid sequence of SEQ ID NO: 1772, d. CDR-L1 comprising the amino acid sequence of SEQ ID NO: 959, e. CDR-L2 comprising the amino acid sequence of SEQ ID NO: 1501, and f. CDR-L3 comprising the amino acid sequence of SEQ ID NO: 2043.

[1996] In one aspect, the present disclosure provides an antibody or antigen-binding fragment thereof comprising a CDR-H3 comprising the amino acid sequence of SEQ ID NO: 1772 and a CDR-L3 comprising the amino acid sequence of SEQ ID NO: 2043.

[1997] In one aspect, the present disclosure provides an antibody or antigen-binding fragment thereof comprising at least one, at least two, or all three VH CDR sequences selected from: a. CDR-H1 comprising the amino acid sequence of SEQ ID NO: 688, b. CDR-H2 comprising the amino acid sequence of SEQ ID NO: 1230, c. CDR-H3 comprising the amino acid sequence of SEQ ID NO: 1772, and a VL comprising the amino acid sequence of SEQ ID NO: 417.

[1998] In one aspect, the present disclosure provides an antibody or antigen-binding fragment thereof comprising at least one, at least two, or all three VL CDR sequences selected from: a. CDR-L1 comprising the amino acid sequence of SEQ ID NO: 959, b. CDR-L2 comprising the amino acid sequence of SEQ ID NO: 1501, c. CDR-L3 comprising the amino acid sequence of SEQ ID NO: 2043, and a VH comprising the amino acid sequence of SEQ ID NO: 146.

[1999] In one aspect, an antibody or antigen-binding fragment thereof is provided, wherein the antibody or antigen-binding fragment thereof comprises a heavy chain variable domain (VH) having at least 90%, 91%, 92%, 93%, 94%, 95%, 96%, 97%, 98%, 99%, or 100% sequence identity to the amino acid sequence SEQ ID NO: 146. In some embodiments, a VH sequence having at least 90%, 91%, 92%, 93%, 94%, 95%, 96%, 97%, 98%, or 99% identity contains substitutions (e.g., conservative substitutions), insertions, or deletions relative to the reference sequence, but an antibody or antigen-binding fragment thereof comprising that sequence retains the ability to bind to same antigen as of the parent (e.g., cancer associated antigen). In some embodiments, a total of 1 to 10 amino acids have been substituted, inserted and/or deleted in the amino acid sequence SEQ ID NO: 146. In some embodiments, substitutions, insertions, or deletions occur in regions outside the CDRs (e.g., in the FRs). Optionally, the antibody or antigen-binding fragment thereof comprises the VH sequence SEQ ID NO: 146, including one or more post-translational modifications of that sequence. In a particular embodiment, the VH comprises one, two or three CDRs selected from: a. CDR-H1, comprising the amino acid sequence SEQ ID NO: 688, b. CDR-H2, comprising the amino acid sequence SEQ ID NO: 1230, and c. CDR-H3, comprising the amino acid sequence SEQ ID NO: 1772.

[2000] In one aspect, an antibody or antigen-binding fragment thereof is provided, wherein the antibody or antigen-binding fragment thereof comprises a light chain variable domain (VL) having at least 90%, 91%, 92%, 93%, 94%, 95%, 96%, 97%, 98%, 99%, or 100% sequence identity to the amino acid sequence SEQ ID NO: 417. In some embodiments, a VL sequence having at least 90%, 91%, 92%, 93%, 94%, 95%, 96%, 97%, 98%, or 99% identity contains substitutions (e.g., conservative substitutions), insertions, or deletions relative to the reference sequence, but an antibody or antigen-binding fragment thereof comprising that sequence retains the ability to bind to same antigen as the parent (e.g., cancer associated antigen). In some embodiments, a total of 1 to 10 amino acids have been substituted, inserted and/or deleted in the amino acid sequence SEQ ID NO: 417. In some embodiments, the substitutions, insertions, or deletions occur in regions outside the CDRs (e.g., in the FRs). Optionally, the antibody or antigen-binding fragment thereof comprises the VL sequence SEQ ID NO: 417, including one or more post-translational modifications of that sequence. In a particular embodiment, the VL comprises one, two or three CDRs selected from: a. CDR-L1, comprising the amino acid sequence SEQ ID NO: 959, b. CDR-L2, comprising the amino acid sequence SEQ ID NO: 1501, and c. CDR-L3, comprising the amino acid sequence SEQ ID NO: 2043.

[2001] In one aspect, an antibody or antigen-binding fragment thereof is provided, wherein the antibody or antigen-binding fragment thereof comprises a VH as in any of the embodiments provided above, and a VL as in any of the embodiments provided above. In some embodiments, the antibody or antigen-binding fragment thereof comprises the VH amino acid sequence of SEQ ID NO: 146, and the VL amino acid sequence of SEQ ID NO: 417, optionally including post-translational modifications of those sequences.

### TLUA1007

[2002] In one aspect, the present disclosure provides an antibody or antigen-binding fragment thereof comprising at least one or both variable regions selected from: a. VH comprising the amino acid sequence of SEQ ID NO: 147 and b. VL comprising the amino acid sequence of SEQ ID NO: 418.

[2003] In one aspect, the present disclosure provides an antibody or antigen-binding fragment thereof comprising at least one, two, three, four, five, or six CDRs selected from: a. CDR-H1 comprising the amino acid sequence of SEQ ID NO: 689, b. CDR-H2 comprising the amino acid sequence of SEQ ID NO: 1231, c. CDR-H3 comprising the amino acid sequence of SEQ ID NO: 1773, d. CDR-L1 comprising the amino acid sequence of SEQ ID NO: 960, e. CDR-L2 comprising the amino acid sequence of SEQ ID NO: 1502, and f. CDR-L3 comprising the amino acid sequence of SEQ ID NO: 2044.

[2004] In one aspect, the present disclosure provides an antibody or antigen-binding fragment thereof comprising a CDR-H3 comprising the amino acid sequence of SEQ ID NO: 1773, and a CDR-L3 comprising the amino acid sequence of SEQ ID NO: 2044.

[2005] In one aspect, the present disclosure provides an antibody or antigen-binding fragment thereof comprising at least one, at least two, or all three VH CDR sequences selected from: a. CDR-H1 comprising the amino acid sequence of SEQ ID NO: 689, b. CDR-H2 comprising the amino acid sequence of SEQ ID NO: 1231, c. CDR-H3 comprising the amino acid sequence of SEQ ID NO: 1773, and a VL comprising the amino acid sequence of SEQ ID NO: 418.

[2006] In one aspect, the present disclosure provides an antibody or antigen-binding fragment thereof comprising at least one, at least two, or all three VL CDR sequences selected from: a. CDR-L1 comprising the amino acid sequence of SEQ ID NO: 960, b. CDR-L2 comprising the amino acid sequence of SEQ ID NO: 1502, c. CDR-L3 comprising the amino acid sequence of SEQ ID NO: 2044, and a VH comprising the amino acid sequence of SEQ ID NO: 147.

[2007] In one aspect, an antibody or antigen-binding fragment thereof is provided, wherein the antibody or antigen-binding fragment thereof comprises a heavy chain variable domain (VH) having at least 90%, 91%, 92%, 93%, 94%, 95%, 96%, 97%, 98%, 99%, or 100% sequence identity to the amino acid sequence SEQ ID NO: 147. In some embodiments, a VH sequence having at least 90%, 91%, 92%, 93%, 94%, 95%, 96%, 97%, 98%, or 99% identity contains substitutions (e.g., conservative substitutions), insertions, or deletions relative to the reference sequence, but an antibody or antigen-binding fragment thereof comprising that sequence retains the ability to bind to same antigen as of the parent (e.g., cancer associated antigen). In some embodiments, a total of 1 to 10 amino acids have been substituted, inserted and/or deleted in the amino acid sequence SEQ ID NO: 147. In some embodiments, substitutions, insertions, or deletions occur in regions outside the CDRs (e.g., in the FRs). Optionally, the antibody or antigen-binding fragment thereof comprises the VH sequence SEQ ID NO: 147, including one or more post-translational modifications of that sequence. In a particular embodiment, the VH comprises one, two or three CDRs selected from: a. CDR-H1, comprising the amino acid sequence SEQ ID NO: 689, b. CDR-H2, comprising the amino acid sequence SEQ ID NO: 1231, and c. CDR-H3, comprising the amino acid sequence SEQ ID NO: 1773.

[2008] In one aspect, an antibody or antigen-binding fragment thereof is provided, wherein the antibody or antigen-binding fragment thereof comprises a light chain variable domain (VL) having at least 90%, 91%, 92%, 93%, 94%, 95%, 96%, 97%, 98%, 99%, or 100% sequence identity to the amino acid sequence SEQ ID NO: 418. In some embodiments, a VL sequence having at least 90%, 91%, 92%, 93%, 94%, 95%, 96%, 97%, 98%, or 99% identity contains substitutions (e.g., conservative substitutions), insertions, or deletions relative to the reference sequence, but an antibody or antigen-binding fragment thereof comprising that sequence retains the ability to bind to same antigen as the parent (e.g., cancer associated antigen). In some embodiments, a total of 1 to 10 amino acids have been substituted, inserted and/or deleted in the amino acid sequence SEQ ID NO: 418. In some embodiments, the substitutions, insertions, or deletions occur in regions outside the CDRs (e.g., in the FRs). Optionally, the antibody or antigen-binding fragment thereof comprises the VL sequence SEQ ID NO: 418, including one or more post-translational modifications of that sequence. In a particular embodiment, the VL comprises one, two or three CDRs selected from: a. CDR-L1, comprising the amino acid sequence SEQ ID NO: 960, b. CDR-L2, comprising the amino acid sequence SEQ ID NO: 1502, and c. CDR-L3, comprising the amino acid sequence SEQ ID NO: 2044.

[2009] In one aspect, an antibody or antigen-binding fragment thereof is provided, wherein the antibody or antigen-binding fragment thereof comprises a VH as in any of the embodiments provided above, and a VL as in any of the embodiments provided above. In some embodiments, the antibody or antigen-binding fragment thereof comprises the VH amino acid sequence of SEQ ID NO: 147, and the VL amino acid sequence of SEQ ID NO: 418, optionally including post-translational modifications of those sequences.

### TLUA1008

[2010] In one aspect, the present disclosure provides an antibody or antigen-binding fragment thereof comprising at least one or both variable regions selected from: a. VH comprising the amino acid sequence of SEQ ID NO: 148 and b. VL comprising the amino acid sequence of SEQ ID NO: 419.

[2011] In one aspect, the present disclosure provides an antibody or antigen-binding fragment thereof comprising at least one, two, three, four, five, or six CDRs selected from: a. CDR-H1 comprising the amino acid sequence of SEQ ID NO: 690, b. CDR-H2 comprising the amino acid sequence of SEQ ID NO: 1232, c. CDR-H3 comprising the amino acid sequence of SEQ ID NO: 1774, d. CDR-L1 comprising the amino acid sequence of SEQ ID NO: 961, e. CDR-L2 comprising the amino acid sequence of SEQ ID NO: 1503, and f. CDR-L3 comprising the amino acid sequence of SEQ ID NO: 2045.

[2012] In one aspect, the present disclosure provides an antibody or antigen-binding fragment thereof comprising a CDR-H3 comprising the amino acid sequence of SEQ ID NO: 1774, and a CDR-L3 comprising the amino acid sequence of SEQ ID NO: 2045.

[2013] In one aspect, the present disclosure provides an antibody or antigen-binding fragment thereof comprising at least one, at least two, or all three VH CDR sequences selected from: a. CDR-H1 comprising the amino acid sequence of SEQ ID NO: 690, b. CDR-H2 comprising the amino acid sequence of SEQ ID NO: 1232, c. CDR-H3 comprising the amino acid sequence of SEQ ID NO: 1774, and VL comprising the amino acid sequence of SEQ ID NO: 419.

[2014] In one aspect, the present disclosure provides an antibody or antigen-binding fragment thereof comprising at least one, at least two, or all three VL CDR sequences selected from: a. CDR-L1 comprising the amino acid sequence of SEQ ID NO: 961, b. CDR-L2 comprising the amino acid sequence of SEQ ID NO: 1503, c. CDR-L3 comprising the amino acid sequence of SEQ ID NO: 2045, and a VH comprising the amino acid sequence of SEQ ID NO: 148.

[2015] In one aspect, an antibody or antigen-binding fragment thereof is provided, wherein the antibody or antigen-binding fragment thereof comprises a heavy chain variable domain (VH) having at least 90%, 91%, 92%, 93%, 94%, 95%, 96%, 97%, 98%, 99%, or 100% sequence identity to the amino acid sequence SEQ ID NO: 148. In some embodiments, a VH sequence having at least 90%, 91%, 92%, 93%, 94%, 95%, 96%, 97%, 98%, or 99% identity contains substitutions (e.g., conservative substitutions), insertions, or deletions relative to the reference sequence, but an antibody or antigen-binding fragment thereof comprising that sequence retains the ability to bind to same antigen as of the parent (e.g., cancer associated antigen). In some embodiments, a total of 1 to 10 amino acids have been substituted, inserted and/or deleted in the amino acid sequence SEQ ID NO: 148. In some embodiments, substitutions, insertions, or deletions occur in regions outside the CDRs (e.g., in the FRs). Optionally, the antibody or antigen-binding fragment thereof comprises the VH sequence SEQ ID NO: 148, including one or more post-translational modifications of that sequence. In a particular embodiment, the VH comprises one, two or three CDRs selected from: a. CDR-H1, comprising the amino acid sequence SEQ ID NO: 690, b. CDR-H2, comprising the amino acid sequence SEQ ID NO: 1232, and c. CDR-H3, comprising the amino acid sequence SEQ ID NO: 1774.

[2016] In one aspect, an antibody or antigen-binding fragment thereof is provided, wherein the antibody or antigen-binding fragment thereof comprises a light chain variable domain (VL) having at least 90%, 91%, 92%, 93%, 94%, 95%, 96%, 97%, 98%, 99%, or 100% sequence identity to the amino acid sequence SEQ ID NO: 419. In some embodiments, a VL sequence having at least 90%, 91%, 92%, 93%, 94%, 95%, 96%, 97%, 98%, or 99% identity contains substitutions (e.g., conservative substitutions), insertions, or deletions relative to the reference sequence, but an antibody or antigen-binding fragment thereof comprising that sequence retains the ability to bind to same antigen as the parent (e.g., cancer associated antigen). In some embodiments, a total of 1 to 10 amino acids have been substituted, inserted and/or deleted in the amino acid sequence SEQ ID NO: 419. In some embodiments, the substitutions, insertions, or deletions occur in regions outside the CDRs (e.g., in the FRs). Optionally, the antibody or antigen-binding fragment thereof comprises the VL sequence SEQ ID NO: 419, including one or more post-translational modifications of that sequence. In a particular embodiment, the VL comprises one, two or three CDRs selected from: a. CDR-L1, comprising the amino acid sequence SEQ ID NO: 961, b. CDR-L2, comprising the amino acid sequence SEQ ID NO: 1503, and c. CDR-L3, comprising the amino acid sequence SEQ ID NO: 2045.

[2017] In one aspect, an antibody or antigen-binding fragment thereof is provided, wherein the antibody or antigen-binding fragment thereof comprises a VH as in any of the embodiments provided above, and a VL as in any of the embodiments provided above. In some embodiments, the antibody or antigen-binding fragment thereof comprises the VH amino acid sequence of SEQ ID NO: 148, and the VL amino acid sequence of SEQ ID NO: 419, optionally including post-translational modifications of those sequences.

### TLUA1009

[2018] In one aspect, the present disclosure provides an antibody or antigen-binding fragment thereof comprising at least one or both variable regions selected from: a. VH comprising the amino acid sequence of SEQ ID NO: 149 and b. VL comprising the amino acid sequence of SEQ ID NO: 420.

[2019] In one aspect, the present disclosure provides an antibody or antigen-binding fragment thereof comprising at least one, two, three, four, five, or six CDRs selected from: a CDR-H1 comprising the amino acid sequence of SEQ ID NO: 691, b. CDR-H2 comprising the amino acid sequence of SEQ ID NO: 1233, c. CDR-H3 comprising the amino acid sequence of SEQ ID NO: 1775, d. CDR-L1 comprising the amino acid sequence of SEQ ID NO: 962, e. CDR-L2 comprising the amino acid sequence of SEQ ID NO: 1504, and f. CDR-L3 comprising the amino acid sequence of SEQ ID NO: 2046.

[2020] In one aspect, the present disclosure provides an antibody or antigen-binding fragment thereof comprising a CDR-H3 comprising the amino acid sequence of SEQ ID NO: 1775, and a CDR-L3 comprising the amino acid sequence of SEQ ID NO: 2046.

[2021] In one aspect, the present disclosure provides an antibody or antigen-binding fragment thereof comprising at least one, at least two, or all three VH CDR sequences selected from: a. CDR-H1 comprising the amino acid sequence of SEQ ID NO: 691, b. CDR-H2 comprising the amino acid sequence of SEQ ID NO: 1233, c. CDR-H3 comprising the amino acid sequence of SEQ ID NO: 1775, and a VL comprising the amino acid sequence of SEQ ID NO: 420.

[2022] In one aspect, the present disclosure provides an antibody or antigen-binding fragment thereof comprising at least one, at least two, or all three VL CDR sequences selected from: a. CDR-L1 comprising the amino acid sequence of SEQ ID NO: 962, b. CDR-L2 comprising the amino acid sequence of SEQ ID NO: 1504, c. CDR-L3 comprising the amino acid sequence of SEQ ID NO: 2046, and a VH comprising the amino acid sequence of SEQ ID NO: 149.

[2023] In one aspect, an antibody or antigen-binding fragment thereof is provided, wherein the antibody or antigen-binding fragment thereof comprises a heavy chain variable domain (VH) having at least 90%, 91%, 92%, 93%, 94%, 95%, 96%, 97%, 98%, 99%, or 100% sequence identity to the amino acid sequence SEQ ID NO: 149. In some embodiments, a VH sequence having at least 90%, 91%, 92%, 93%, 94%, 95%, 96%, 97%, 98%, or 99% identity contains substitutions (e.g., conservative substitutions), insertions, or deletions relative to the reference sequence, but an antibody or antigen-binding fragment thereof comprising that sequence retains the ability to bind to same antigen as of the parent (e.g., cancer associated antigen). In some embodiments, a total of 1 to 10 amino acids have been substituted, inserted and/or deleted in the amino acid sequence SEQ ID NO: 149. In some embodiments, substitutions, insertions, or deletions occur in regions outside the CDRs (e.g., in the FRs). Optionally, the antibody or antigen-binding fragment thereof comprises the VH sequence SEQ ID NO: 149, including one or more post-translational modifications of that sequence. In a particular embodiment, the VH comprises one, two or three CDRs selected from: a. CDR-H1, comprising the amino acid sequence SEQ ID NO: 691, b. CDR-H2, comprising the amino acid sequence SEQ ID NO: 1233, and c. CDR-H3, comprising the amino acid sequence SEQ ID NO: 1775.

[2024] In one aspect, an antibody or antigen-binding fragment thereof is provided, wherein the antibody or antigen-binding fragment thereof comprises a light chain variable domain (VL) having at least 90%, 91%, 92%, 93%, 94%, 95%, 96%, 97%, 98%, 99%, or 100% sequence identity to the amino acid sequence SEQ ID NO: 420. In some embodiments, a VL sequence having at least 90%, 91%, 92%, 93%, 94%, 95%, 96%, 97%, 98%, or 99% identity contains substitutions (e.g., conservative substitutions), insertions, or deletions relative to the reference sequence, but an antibody or antigen-binding fragment thereof comprising that sequence retains the ability to bind to same antigen as the parent (e.g., cancer associated antigen). In some embodiments, a total of 1 to 10 amino acids have been substituted, inserted and/or deleted in the amino acid sequence SEQ ID NO: 420. In some embodiments, the substitutions, insertions, or deletions occur in regions outside the CDRs (e.g., in the FRs). Optionally, the antibody or antigen-binding fragment thereof comprises the VL sequence SEQ ID NO: 420, including one or more post-translational modifications of that sequence. In a particular embodiment, the VL comprises one, two or three CDRs selected from: a. CDR-L1, comprising the amino acid sequence SEQ ID NO: 962, b. CDR-L2, comprising the amino acid sequence SEQ ID NO: 1504, and c. CDR-L3, comprising the amino acid sequence SEQ ID NO: 2046.

[2025] In one aspect, an antibody or antigen-binding fragment thereof is provided, wherein the antibody or antigen-binding fragment thereof comprises a VH as in any of the embodiments provided above, and a VL as in any of the embodiments provided above. In some embodiments, the antibody or antigen-binding fragment thereof comprises the VH amino acid sequence of SEQ ID NO: 149, and the VL amino acid sequence of SEQ ID NO: 420, optionally including post-translational modifications of those sequences.

[2026] TLUA1010

[2027] In one aspect, the present disclosure provides an antibody or antigen-binding fragment thereof comprising at least one or both variable regions selected from: a. VH comprising the amino acid sequence of SEQ ID NO: 150 and b. VL comprising the amino acid sequence of SEQ ID NO: 421.

[2028] In one aspect, the present disclosure provides an antibody or antigen-binding fragment thereof comprising at least one, two, three, four, five, or six CDRs selected from: a. CDR-H1 comprising the amino acid sequence of SEQ ID NO: 692, b. CDR-H2 comprising the amino acid sequence of SEQ ID NO: 1234, c. CDR-H3 comprising the amino acid sequence of SEQ ID NO: 1776, d. CDR-L1 comprising the amino acid sequence of SEQ ID NO: 963, e. CDR-L2 comprising the amino acid sequence of SEQ ID NO: 1505, and f. CDR-L3 comprising the amino acid sequence of SEQ ID NO: 2047.

[2029] In one aspect, the present disclosure provides an antibody or antigen-binding fragment thereof comprising a CDR-H3 comprising the amino acid sequence of SEQ ID NO: 1776 and a CDR-L3 comprising the amino acid sequence of SEQ ID NO: 2047.

[2030] In one aspect, the present disclosure provides an antibody or antigen-binding fragment thereof comprising at least one, at least two, or all three VH CDR sequences selected from: a. CDR-H1 comprising the amino acid sequence of SEQ ID NO: 692, b. CDR-H2 comprising the amino acid sequence of SEQ ID NO: 1234, c. CDR-H3 comprising the amino acid sequence of SEQ ID NO: 1776, and a VL comprising the amino acid sequence of SEQ ID NO: 421.

[2031] In one aspect, the present disclosure provides an antibody or antigen-binding fragment thereof comprising at least one, at least two, or all three VL CDR sequences selected from: a. CDR-L1 comprising the amino acid sequence of SEQ ID NO: 963, b. CDR-L2 comprising the amino acid sequence of SEQ ID NO: 1505, c. CDR-L3 comprising the amino acid sequence of SEQ ID NO: 2047, and a VH comprising the amino acid sequence of SEQ ID NO: 150.

[2032] In one aspect, an antibody or antigen-binding fragment thereof is provided, wherein the antibody or antigen-binding fragment thereof comprises a heavy chain variable domain (VH) having at least 90%, 91%, 92%, 93%, 94%, 95%, 96%, 97%, 98%, 99%, or 100% sequence identity to the amino acid sequence SEQ ID NO: 150. In some embodiments, a VH sequence having at least 90%, 91%, 92%, 93%, 94%, 95%, 96%, 97%, 98%, or 99% identity contains substitutions (e.g., conservative substitutions), insertions, or deletions relative to the reference sequence, but an antibody or antigen-binding fragment thereof comprising that sequence retains the ability to bind to same antigen as of the parent (e.g., cancer associated antigen). In some embodiments, a total of 1 to 10 amino acids have been substituted, inserted and/or deleted in the amino acid sequence SEQ ID NO: 150. In some embodiments, substitutions, antigen-binding fragment thereof comprises the VH sequence SEQ ID NO: 150, including one or more post-translational modifications of that sequence. In a particular embodiment, the VH comprises one, two or three CDRs selected from: a. CDR-H1, comprising the amino acid sequence SEQ ID NO: 692, b. CDR-H2, comprising the amino acid sequence SEQ ID NO: 1234, and c. CDR-H3, comprising the amino acid sequence SEQ ID NO: 1776.

[2033] In one aspect, an antibody or antigen-binding fragment thereof is provided, wherein the antibody or antigen-binding fragment thereof comprises a light chain variable domain (VL) having at least 90%, 91%, 92%, 93%, 94%, 95%, 96%, 97%, 98%, 99%, or 100% sequence identity to the amino acid sequence SEQ ID NO: 421. In some embodiments, a VL sequence having at least 90%, 91%, 92%, 93%, 94%, 95%, 96%, 97%, 98%, or 99% identity contains substitutions (e.g., conservative substitutions), insertions, or deletions relative to the reference sequence, but an antibody or antigen-binding fragment thereof comprising that sequence retains the ability to bind to same antigen as the parent (e.g., cancer associated antigen). In some embodiments, a total of 1 to 10 amino acids have been substituted, inserted and/or deleted in the amino acid sequence SEQ ID NO: 421. In some embodiments, the substitutions, insertions, or deletions occur in regions outside the CDRs (e.g., in the FRs). Optionally, the antibody or antigen-binding fragment thereof comprises the VL sequence SEQ ID NO: 421, including one or more post-translational modifications of that sequence. In a particular embodiment, the VL comprises one, two or three CDRs selected from: a. CDR-L1, comprising the amino acid sequence SEQ ID NO: 963, b. CDR-L2, comprising the amino acid sequence SEQ ID NO: 1505, and c. CDR-L3, comprising the amino acid sequence SEQ ID NO: 2047.

[2034] In one aspect, an antibody or antigen-binding fragment thereof is provided, wherein the antibody or antigen-binding fragment thereof comprises a VH as in any of the embodiments provided above, and a VL as in any of the embodiments provided above. In some embodiments, the antibody or antigen-binding fragment thereof comprises the VH amino acid sequence of SEQ ID NO: 150, and the VL amino acid sequence of SEQ ID NO: 421, optionally including post-translational modifications of those sequences.

### TLUA1011

[2035] In one aspect, the present disclosure provides an antibody or antigen-binding fragment thereof comprising at least one or both variable regions selected from: a. VH comprising the amino acid sequence of SEQ ID NO: 151 and b. VL comprising the amino acid sequence of SEQ ID NO: 422.

[2036] In one aspect, the present disclosure provides an antibody or antigen-binding fragment thereof comprising at least one, two, three, four, five, or six CDRs selected from: a. CDR-H1 comprising the amino acid sequence of SEQ ID NO: 693, b. CDR-H2 comprising the amino acid sequence of SEQ ID NO: 1235, c. CDR-H3 comprising the amino acid sequence of SEQ ID NO: 1777, d. CDR-L1 comprising the amino acid sequence of SEQ ID NO: 964, e. CDR-L2 comprising the amino acid sequence of SEQ ID NO: 1506, and f. CDR-L3 comprising the amino acid sequence of SEQ ID NO: 2048.

[2037] In one aspect, the present disclosure provides an antibody or antigen-binding fragment thereof comprising a CDR-H3 comprising the amino acid sequence of SEQ ID NO: 1777, and a CDR-L3 comprising the amino acid sequence of SEQ ID NO: 2048.

[2038] In one aspect, the present disclosure provides an antibody or antigen-binding fragment thereof comprising at least one, at least two, or all three VH CDR sequences selected from: a. CDR-H1 comprising the amino acid sequence of SEQ ID NO: 693, b. CDR-H2 comprising the amino acid sequence of SEQ ID NO: 1235, c. CDR-H3 comprising the amino acid sequence of SEQ ID NO: 1777, and a VL comprising the amino acid sequence of SEQ ID NO: 422.

[2039] In one aspect, the present disclosure provides an antibody or antigen-binding fragment thereof comprising at least one, at least two, or all three VL CDR sequences selected from: a. CDR-L1 comprising the amino acid sequence of SEQ ID NO: 964, b. CDR-L2 comprising the amino acid sequence of SEQ ID NO: 1506, c. CDR-L3 comprising the amino acid sequence of SEQ ID NO: 2048, and d. VH comprising the amino acid sequence of SEQ ID NO: 151.

[2040] In one aspect, an antibody or antigen-binding fragment thereof is provided, wherein the antibody or antigen-binding fragment thereof comprises a heavy chain variable domain (VH) having at least 90%, 91%, 92%, 93%, 94%, 95%, 96%, 97%, 98%, 99%, or 100% sequence identity to the amino acid sequence SEQ ID NO: 151. In some embodiments, a VH sequence having at least 90%, 91%, 92%, 93%, 94%, 95%, 96%, 97%, 98%, or 99% identity contains substitutions (e.g., conservative substitutions), insertions, or deletions relative to the reference sequence, but an antibody or antigen-binding fragment thereof comprising that sequence retains the ability to bind to same antigen as of the parent (e.g., cancer associated antigen). In some embodiments, a total of 1 to 10 amino acids have been substituted, inserted and/or deleted in the amino acid sequence SEQ ID NO: 151. In some embodiments, substitutions, insertions, or deletions occur in regions outside the CDRs (e.g., in the FRs). Optionally, the antibody or antigen-binding fragment thereof comprises the VH sequence SEQ ID NO: 151, including one or more post-translational modifications of that sequence. In a particular embodiment, the VH comprises one, two or three CDRs selected from: a. CDR-H1, comprising the amino acid sequence SEQ ID NO: 693, b. CDR-H2, comprising the amino acid sequence SEQ ID NO: 1235, and a. CDR-H3, comprising the amino acid sequence SEQ ID NO: 1777.

[2041] In one aspect, an antibody or antigen-binding fragment thereof is provided, wherein the antibody or antigen-binding fragment thereof comprises a light chain variable domain (VL) having at least 90%, 91%, 92%, 93%, 94%, 95%, 96%, 97%, 98%, 99%, or 100% sequence identity to the amino acid sequence SEQ ID NO: 422. In some embodiments, a VL sequence having at least 90%, 91%, 92%, 93%, 94%, 95%, 96%, 97%, 98%, or 99% identity contains substitutions (e.g., conservative substitutions), insertions, or deletions relative to the reference sequence, but an antibody or antigen-binding fragment thereof comprising that sequence retains the ability to bind to same antigen as the parent (e.g., cancer associated antigen). In some embodiments, a total of 1 to 10 amino acids have been substituted, inserted and/or deleted in the amino acid sequence SEQ ID NO: 422. In some embodiments, the substitutions, insertions, or deletions occur in regions outside the CDRs (e.g., in the FRs). Optionally, the antibody or antigen-binding fragment thereof comprises the VL sequence SEQ ID NO: 422, including one or more post-translational modifications of that sequence. In a particular embodiment, the VL comprises one, two or three CDRs selected from: a. CDR-L1, comprising the amino acid sequence SEQ ID NO: 964, b. CDR-L2, comprising the amino acid sequence SEQ ID NO: 1506, and c. CDR-L3, comprising the amino acid sequence SEQ ID NO: 2048.

[2042] In one aspect, an antibody or antigen-binding fragment thereof is provided, wherein the antibody or antigen-binding fragment thereof comprises a VH as in any of the embodiments provided above, and a VL as in any of the embodiments provided above. In some embodiments, the antibody or antigen-binding fragment thereof comprises the VH amino acid sequence of SEQ ID NO: 151, and the VL amino acid sequence of SEQ ID NO: 422, optionally including post-translational modifications of those sequences.

### TLUA1012

[2043] In one aspect, the present disclosure provides an antibody or antigen-binding fragment thereof comprising at least one or both variable regions selected from: a. VH comprising the amino acid sequence of SEQ ID NO: 152 and a VL comprising the amino acid sequence of SEQ ID NO: 423.

[2044] In one aspect, the present disclosure provides an antibody or antigen-binding fragment thereof comprising at least one, two, three, four, five, or six CDRs selected from: a. CDR-H1 comprising the amino acid sequence of SEQ ID NO: 694, b. CDR-H2 comprising the amino acid sequence of SEQ ID NO: 1236, c. CDR-H3 comprising the amino acid sequence of SEQ ID NO: 1778, d. CDR-L1 comprising the amino acid sequence of SEQ ID NO: 965, e. CDR-L2 comprising the amino acid sequence of SEQ ID NO: 1507, and f. CDR-L3 comprising the amino acid sequence of SEQ ID NO: 2049.

[2045] In one aspect, the present disclosure provides an antibody or antigen-binding fragment thereof comprising a CDR-H3 comprising the amino acid sequence of SEQ ID NO: 1778, and a CDR-L3 comprising the amino acid sequence of SEQ ID NO: 2049.

[2046] In one aspect, the present disclosure provides an antibody or antigen-binding fragment thereof comprising at least one, at least two, or all three VH CDR sequences selected from: a. CDR-H1 comprising the amino acid sequence of SEQ ID NO: 694, b. CDR-H2 comprising the amino acid sequence of SEQ ID NO: 1236, c. CDR-H3 comprising the amino acid sequence of SEQ ID NO: 1778, and a VL comprising the amino acid sequence of SEQ ID NO: 423.

[2047] In one aspect, the present disclosure provides an antibody or antigen-binding fragment thereof comprising at least one, at least two, or all three VL CDR sequences selected from: a. CDR-L1 comprising the amino acid sequence of SEQ ID NO: 965, b. CDR-L2 comprising the amino acid sequence of SEQ ID NO: 1507, c. CDR-L3 comprising the amino acid sequence of SEQ ID NO: 2049, and a VH comprising the amino acid sequence of SEQ ID NO: 152.

[2048] In one aspect, an antibody or antigen-binding fragment thereof is provided, wherein the antibody or antigen-binding fragment thereof comprises a heavy chain variable domain (VH) having at least 90%, 91%, 92%, 93%, 94%, 95%, 96%, 97%, 98%, 99%, or 100% sequence identity to the amino acid sequence SEQ ID NO: 152. In some embodiments, a VH sequence having at least 90%, 91%, 92%, 93%, 94%, 95%, 96%, 97%, 98%, or 99% identity contains substitutions (e.g., conservative substitutions), insertions, or deletions relative to the reference sequence, but an antibody or antigen-binding fragment thereof comprising that sequence retains the ability to bind to same antigen as of the parent (e.g., cancer associated antigen). In some embodiments, a total of 1 to 10 amino acids have been substituted, inserted and/or deleted in the amino acid sequence SEQ ID NO: 152. In some embodiments, substitutions, insertions, or deletions occur in regions outside the CDRs (e.g., in the FRs). Optionally, the antibody or antigen-binding fragment thereof comprises the VH sequence SEQ ID NO: 152, including one or more post-translational modifications of that sequence. In a particular embodiment, the VH comprises one, two or three CDRs selected from: a. CDR-H1, comprising the amino acid sequence SEQ ID NO: 694, b. CDR-H2, comprising the amino acid sequence SEQ ID NO: 1236, and c. CDR-H3, comprising the amino acid sequence SEQ ID NO: 1778.

[2049] In one aspect, an antibody or antigen-binding fragment thereof is provided, wherein the antibody or antigen-binding fragment thereof comprises a light chain variable domain (VL) having at least 90%, 91%, 92%, 93%, 94%, 95%, 96%, 97%, 98%, 99%, or 100% sequence identity to the amino acid sequence SEQ ID NO: 423. In some embodiments, a VL sequence having at least 90%, 91%, 92%, 93%, 94%, 95%, 96%, 97%, 98%, or 99% identity contains substitutions (e.g., conservative substitutions), insertions, or deletions relative to the reference sequence, but an antibody or antigen-binding fragment thereof comprising that sequence retains the ability to bind to same antigen as the parent (e.g., cancer associated antigen). In some embodiments, a total of 1 to 10 amino acids have been substituted, inserted and/or deleted in the amino acid sequence SEQ ID NO: 423. In some embodiments, the substitutions, insertions, or deletions occur in regions outside the CDRs (e.g., in the FRs). Optionally, the antibody or antigen-binding fragment thereof comprises the VL sequence SEQ ID NO: 423, including one or more post-translational modifications of that sequence. In a particular embodiment, the VL comprises one, two or three CDRs selected from: a. CDR-L1, comprising the amino acid sequence SEQ ID NO: 965, b. CDR-L2, comprising the amino acid sequence SEQ ID NO: 1507, and c. CDR-L3, comprising the amino acid sequence SEQ ID NO: 2049.

[2050] In one aspect, an antibody or antigen-binding fragment thereof is provided, wherein the antibody or antigen-binding fragment thereof comprises a VH as in any of the embodiments provided above, and a VL as in any of the embodiments provided above. In some embodiments, the antibody or antigen-binding fragment thereof comprises the VH amino acid sequence of SEQ ID NO: 152, and the VL amino acid sequence of SEQ ID NO: 423, optionally including post-translational modifications of those sequences.

### TLUA1013

[2051] In one aspect, the present disclosure provides an antibody or antigen-binding fragment thereof comprising at least one or both variable regions selected from: a. VH comprising the amino acid sequence of SEQ ID NO: 153 and b. VL comprising the amino acid sequence of SEQ ID NO: 424.

[2052] In one aspect, the present disclosure provides an antibody or antigen-binding fragment thereof comprising at least one, two, three, four, five, or six CDRs selected from: a. CDR-H1 comprising the amino acid sequence of SEQ ID NO: 695, b. CDR-H2 comprising the amino acid sequence of SEQ ID NO: 1237, c. CDR-H3 comprising the amino acid sequence of SEQ ID NO: 1779, d. CDR-L1 comprising the amino acid sequence of SEQ ID NO: 966, e. CDR-L2 comprising the amino acid sequence of SEQ ID NO: 1508, and f. CDR-L3 comprising the amino acid sequence of SEQ ID NO: 2050.

[2053] In one aspect, the present disclosure provides an antibody or antigen-binding fragment thereof comprising a CDR-H3 comprising the amino acid sequence of SEQ ID NO: 1779, and a CDR-L3 comprising the amino acid sequence of SEQ ID NO: 2050.

[2054] In one aspect, the present disclosure provides an antibody or antigen-binding fragment thereof comprising at least one, at least two, or all three VH CDR sequences selected from: a. CDR-H1 comprising the amino acid sequence of SEQ ID NO: 695, b. CDR-H2 comprising the amino acid sequence of SEQ ID NO: 1237, c. CDR-H3 comprising the amino acid sequence of SEQ ID NO: 1779, and a VL comprising the amino acid sequence of SEQ ID NO: 424.

[2055] In one aspect, the present disclosure provides an antibody or antigen-binding fragment thereof comprising at least one, at least two, or all three VL CDR sequences selected from: a. CDR-L1 comprising the amino acid sequence of SEQ ID NO: 966, b. CDR-L2 comprising the amino acid sequence of SEQ ID NO: 1508, c. CDR-L3 comprising the amino acid sequence of SEQ ID NO: 2050, and a VH comprising the amino acid sequence of SEQ ID NO: 153.

[2056] In one aspect, an antibody or antigen-binding fragment thereof is provided, wherein the antibody or antigen-binding fragment thereof comprises a heavy chain variable domain (VH) having at least 90%, 91%, 92%, 93%, 94%, 95%, 96%, 97%, 98%, 99%, or 100% sequence identity to the amino acid sequence SEQ ID NO: 153. In some embodiments, a VH sequence having at least 90%, 91%, 92%, 93%, 94%, 95%, 96%, 97%, 98%, or 99% identity contains substitutions (e.g., conservative substitutions), insertions, or deletions relative to the reference sequence, but an antibody or antigen-binding fragment thereof comprising that sequence retains the ability to bind to same antigen as of the parent (e.g., cancer associated antigen). In some embodiments, a total of 1 to 10 amino acids have been substituted, inserted and/or deleted in the amino acid sequence SEQ ID NO: 153. In some embodiments, substitutions, insertions, or deletions occur in regions outside the CDRs (e.g., in the FRs). Optionally, the antibody or antigen-binding fragment thereof comprises the VH sequence SEQ ID NO: 153, including one or more post-translational modifications of that sequence. In a particular embodiment, the VH comprises one, two or three CDRs selected from: a. CDR-H1, comprising the amino acid sequence SEQ ID NO: 695, b. CDR-H2, comprising the amino acid sequence SEQ ID NO: 1237, and c. CDR-H3, comprising the amino acid sequence SEQ ID NO: 1779.

[2057] In one aspect, an antibody or antigen-binding fragment thereof is provided, wherein the antibody or antigen-binding fragment thereof comprises a light chain variable domain (VL) having at least 90%, 91%, 92%, 93%, 94%, 95%, 96%, 97%, 98%, 99%, or 100% sequence identity to the amino acid sequence SEQ ID NO: 424. In some embodiments, a VL sequence having at least 90%, 91%, 92%, 93%, 94%, 95%, 96%, 97%, 98%, or 99% identity contains substitutions (e.g., conservative substitutions), insertions, or deletions relative to the reference sequence, but an antibody or antigen-binding fragment thereof comprising that sequence retains the ability to bind to same antigen as the parent (e.g., cancer associated antigen). In some embodiments, a total of 1 to 10 amino acids have been substituted, inserted and/or deleted in the amino acid sequence SEQ ID NO: 424. In some embodiments, the substitutions, antigen-binding fragment thereof comprises the VL sequence SEQ ID NO: 424, including one or more post-translational modifications of that sequence. In a particular embodiment, the VL comprises one, two or three CDRs selected from: a. CDR-L1, comprising the amino acid sequence SEQ ID NO: 966, b. CDR-L2, comprising the amino acid sequence SEQ ID NO: 1508, and c. CDR-L3, comprising the amino acid sequence SEQ ID NO: 2050.

[2058] In one aspect, an antibody or antigen-binding fragment thereof is provided, wherein the antibody or antigen-binding fragment thereof comprises a VH as in any of the embodiments provided above, and a VL as in any of the embodiments provided above. In some embodiments, the antibody or antigen-binding fragment thereof comprises the VH amino acid sequence of SEQ ID NO: 153, and the VL amino acid sequence of SEQ ID NO: 424, optionally including post-translational modifications of those sequences.

### TLUA1014

[2059] In one aspect, the present disclosure provides an antibody or antigen-binding fragment thereof comprising at least one or both variable regions selected from: a. VH comprising the amino acid sequence of SEQ ID NO: 154 and b. VL comprising the amino acid sequence of SEQ ID NO: 425.

[2060] In one aspect, the present disclosure provides an antibody or antigen-binding fragment thereof comprising at least one, two, three, four, five, or six CDRs selected from: a. CDR-H1 comprising the amino acid sequence of SEQ ID NO: 696, b. CDR-H2 comprising the amino acid sequence of SEQ ID NO: 1238, c. CDR-H3 comprising the amino acid sequence of SEQ ID NO: 1780, d. CDR-L1 comprising the amino acid sequence of SEQ ID NO: 967, e. CDR-L2 comprising the amino acid sequence of SEQ ID NO: 1509, and f. CDR-L3 comprising the amino acid sequence of SEQ ID NO: 2051.

[2061] In one aspect, the present disclosure provides an antibody or antigen-binding fragment thereof comprising a CDR-H3 comprising the amino acid sequence of SEQ ID NO: 1780, and a CDR-L3 comprising the amino acid sequence of SEQ ID NO: 2051.

[2062] In one aspect, the present disclosure provides an antibody or antigen-binding fragment thereof comprising at least one, at least two, or all three VH CDR sequences selected from: a. CDR-H1 comprising the amino acid sequence of SEQ ID NO: 696, b. CDR-H2 comprising the amino acid sequence of SEQ ID NO: 1238, c. CDR-H3 comprising the amino acid sequence of SEQ ID NO: 1780, and a VL comprising the amino acid sequence of SEQ ID NO: 425.

[2063] In one aspect, the present disclosure provides an antibody or antigen-binding fragment thereof comprising at least one, at least two, or all three VL CDR sequences selected from: a. CDR-L1 comprising the amino acid sequence of SEQ ID NO: 967, b. CDR-L2 comprising the amino acid sequence of SEQ ID NO: 1509, c. CDR-L3 comprising the amino acid sequence of SEQ ID NO: 2051, and a VH comprising the amino acid sequence of SEQ ID NO: 154.

[2064] In one aspect, an antibody or antigen-binding fragment thereof is provided, wherein the antibody or antigen-binding fragment thereof comprises a heavy chain variable domain (VH) having at least 90%, 91%, 92%, 93%, 94%, 95%, 96%, 97%, 98%, 99%, or 100% sequence identity to the amino acid sequence SEQ ID NO: 154. In some embodiments, a VH sequence having at least 90%, 91%, 92%, 93%, 94%, 95%, 96%, 97%, 98%, or 99% identity contains substitutions (e.g., conservative substitutions), thereof comprising that sequence retains the ability to bind to same antigen as of the parent (e.g., cancer associated antigen). In some embodiments, a total of 1 to 10 amino acids have been substituted, inserted and/or deleted in the amino acid sequence SEQ ID NO: 154. In some embodiments, substitutions, insertions, or deletions occur in regions outside the CDRs (e.g., in the FRs). Optionally, the antibody or antigen-binding fragment thereof comprises the VH sequence SEQ ID NO: 154, including one or more post-translational modifications of that sequence. In a particular embodiment, the VH comprises one, two or three CDRs selected from: a. CDR-H1, comprising the amino acid sequence SEQ ID NO: 696, b. CDR-H2, comprising the amino acid sequence SEQ ID NO: 1238, and c. CDR-H3, comprising the amino acid sequence SEQ ID NO: 1780.

[2065] In one aspect, an antibody or antigen-binding fragment thereof is provided, wherein the antibody or antigen-binding fragment thereof comprises a light chain variable domain (VL) having at least 90%, 91%, 92%, 93%, 94%, 95%, 96%, 97%, 98%, 99%, or 100% sequence identity to the amino acid sequence SEQ ID NO: 425. In some embodiments, a VL sequence having at least 90%, 91%, 92%, 93%, 94%, 95%, 96%, 97%, 98%, or 99% identity contains substitutions (e.g., conservative substitutions), insertions, or deletions relative to the reference sequence, but an antibody or antigen-binding fragment thereof comprising that sequence retains the ability to bind to same antigen as the parent (e.g., cancer associated antigen). In some embodiments, a total of 1 to 10 amino acids have been substituted, inserted and/or deleted in the amino acid sequence SEQ ID NO: 425. In some embodiments, the substitutions, insertions, or deletions occur in regions outside the CDRs (e.g., in the FRs). Optionally, the antibody or antigen-binding fragment thereof comprises the VL sequence SEQ ID NO: 425, including one or more post-translational modifications of that sequence. In a particular embodiment, the VL comprises one, two or three CDRs selected from: a. CDR-L1, comprising the amino acid sequence SEQ ID NO: 967, b. CDR-L2, comprising the amino acid sequence SEQ ID NO: 1509, and c. CDR-L3, comprising the amino acid sequence SEQ ID NO: 2051.

[2066] In one aspect, an antibody or antigen-binding fragment thereof is provided, wherein the antibody or antigen-binding fragment thereof comprises a VH as in any of the embodiments provided above, and a VL as in any of the embodiments provided above. In some embodiments, the antibody or antigen-binding fragment thereof comprises the VH amino acid sequence of SEQ ID NO: 154, and the VL amino acid sequence of SEQ ID NO: 425, optionally including post-translational modifications of those sequences.

### TLUA1015

[2067] In one aspect, the present disclosure provides an antibody or antigen-binding fragment thereof comprising at least one or both variable regions selected from: a. VH comprising the amino acid sequence of SEQ ID NO: 155 and b. VL comprising the amino acid sequence of SEQ ID NO: 426.

[2068] In one aspect, the present disclosure provides an antibody or antigen-binding fragment thereof comprising at least one, two, three, four, five, or six CDRs selected from: a. CDR-H1 comprising the amino acid sequence of SEQ ID NO: 697, b. CDR-H2 comprising the amino acid sequence of SEQ ID NO: 1239, c. CDR-H3 comprising the amino acid sequence of SEQ ID NO: 1781, d. CDR-L1 comprising the amino acid sequence of SEQ ID NO: 968, e. CDR-L2 comprising the amino acid sequence of SEQ ID NO: 1510, and f. CDR-L3 comprising the amino acid sequence of SEQ ID NO: 2052.

[2069] In one aspect, the present disclosure provides an antibody or antigen-binding fragment thereof comprising a CDR-H3 comprising the amino acid sequence of SEQ ID NO: 1781, and a CDR-L3 comprising the amino acid sequence of SEQ ID NO: 2052.

[2070] In one aspect, the present disclosure provides an antibody or antigen-binding fragment thereof comprising at least one, at least two, or all three VH CDR sequences selected from: a. CDR-H1 comprising the amino acid sequence of SEQ ID NO: 697, b. CDR-H2 comprising the amino acid sequence of SEQ ID NO: 1239, c. CDR-H3 comprising the amino acid sequence of SEQ ID NO: 1781, and a VL comprising the amino acid sequence of SEQ ID NO: 426.

[2071] In one aspect, the present disclosure provides an antibody or antigen-binding fragment thereof comprising at least one, at least two, or all three VL CDR sequences selected from: a. CDR-L1 comprising the amino acid sequence of SEQ ID NO: 968, b. CDR-L2 comprising the amino acid sequence of SEQ ID NO: 1510, c. CDR-L3 comprising the amino acid sequence of SEQ ID NO: 2052, and a VH comprising the amino acid sequence of SEQ ID NO: 155.

[2072] In one aspect, an antibody or antigen-binding fragment thereof is provided, wherein the antibody or antigen-binding fragment thereof comprises a heavy chain variable domain (VH) having at least 90%, 91%, 92%, 93%, 94%, 95%, 96%, 97%, 98%, 99%, or 100% sequence identity to the amino acid sequence SEQ ID NO: 155. In some embodiments, a VH sequence having at least 90%, 91%, 92%, 93%, 94%, 95%, 96%, 97%, 98%, or 99% identity contains substitutions (e.g., conservative substitutions), insertions, or deletions relative to the reference sequence, but an antibody or antigen-binding fragment thereof comprising that sequence retains the ability to bind to same antigen as of the parent (e.g., cancer associated antigen). In some embodiments, a total of 1 to 10 amino acids have been substituted, inserted and/or deleted in the amino acid sequence SEQ ID NO: 155. In some embodiments, substitutions, insertions, or deletions occur in regions outside the CDRs (e.g., in the FRs). Optionally, the antibody or antigen-binding fragment thereof comprises the VH sequence SEQ ID NO: 155, including one or more post-translational modifications of that sequence. In a particular embodiment, the VH comprises one, two or three CDRs selected from: a. CDR-H1, comprising the amino acid sequence SEQ ID NO: 697, b. CDR-H2, comprising the amino acid sequence SEQ ID NO: 1239, and c. CDR-H3, comprising the amino acid sequence SEQ ID NO: 1781.

[2073] In one aspect, an antibody or antigen-binding fragment thereof is provided, wherein the antibody or antigen-binding fragment thereof comprises a light chain variable domain (VL) having at least 90%, 91%, 92%, 93%, 94%, 95%, 96%, 97%, 98%, 99%, or 100% sequence identity to the amino acid sequence SEQ ID NO: 426. In some embodiments, a VL sequence having at least 90%, 91%, 92%, 93%, 94%, 95%, 96%, 97%, 98%, or 99% identity contains substitutions (e.g., conservative substitutions), insertions, or deletions relative to the reference sequence, but an antibody or antigen-binding fragment thereof comprising that sequence retains the ability to bind to same antigen as the parent (e.g., cancer associated antigen). In some embodiments, a total of 1 to 10 amino acids have been substituted, inserted and/or deleted in the amino acid sequence SEQ ID NO: 426. In some embodiments, the substitutions, insertions, or deletions occur in regions outside the CDRs (e.g., in the FRs). Optionally, the antibody or antigen-binding fragment thereof comprises the VL sequence SEQ ID NO: 426, including one or more post-translational modifications of that sequence. In a particular embodiment, the VL comprises one, two or three CDRs selected from: a. CDR-L1, comprising the amino acid sequence SEQ ID NO: 968, b. CDR-L2, comprising the amino acid sequence SEQ ID NO: 1510, and c. CDR-L3, comprising the amino acid sequence SEQ ID NO: 2052.

[2074] In one aspect, an antibody or antigen-binding fragment thereof is provided, wherein the antibody or antigen-binding fragment thereof comprises a VH as in any of the embodiments provided above, and a VL as in any of the embodiments provided above. In some embodiments, the antibody or antigen-binding fragment thereof comprises the VH amino acid sequence of SEQ ID NO: 155, and the VL amino acid sequence of SEQ ID NO: 426, optionally including post-translational modifications of those sequences.

### TLUA1016

[2075] In one aspect, the present disclosure provides an antibody or antigen-binding fragment thereof comprising at least one or both variable regions selected from: a. VH comprising the amino acid sequence of SEQ ID NO: 156 and b. V_{L} comprising the amino acid sequence of SEQ ID NO: 427.

[2076] In one aspect, the present disclosure provides an antibody or antigen-binding fragment thereof comprising at least one, two, three, four, five, or six CDRs selected from: a. CDR-H1 comprising the amino acid sequence of SEQ ID NO: 698, b. CDR-H2 comprising the amino acid sequence of SEQ ID NO: 1240, c. CDR-H3 comprising the amino acid sequence of SEQ ID NO: 1782, d. CDR-L1 comprising the amino acid sequence of SEQ ID NO: 969, e. CDR-L2 comprising the amino acid sequence of SEQ ID NO: 1511, and f. CDR-L3 comprising the amino acid sequence of SEQ ID NO: 2053.

[2077] In one aspect, the present disclosure provides an antibody or antigen-binding fragment thereof comprising a CDR-H3 comprising the amino acid sequence of SEQ ID NO: 1782, and a CDR-L3 comprising the amino acid sequence of SEQ ID NO: 2053.

[2078] In one aspect, the present disclosure provides an antibody or antigen-binding fragment thereof comprising at least one, at least two, or all three VH CDR sequences selected from: a CDR-H1 comprising the amino acid sequence of SEQ ID NO: 698, b. CDR-H2 comprising the amino acid sequence of SEQ ID NO: 1240, c. CDR-H3 comprising the amino acid sequence of SEQ ID NO: 1782, and a VL comprising the amino acid sequence of SEQ ID NO: 427.

[2079] In one aspect, the present disclosure provides an antibody or antigen-binding fragment thereof comprising at least one, at least two, or all three VL CDR sequences selected from: a. CDR-L1 comprising the amino acid sequence of SEQ ID NO: 969, b. CDR-L2 comprising the amino acid sequence of SEQ ID NO: 1511, c. CDR-L3 comprising the amino acid sequence of SEQ ID NO: 2053, and a VH comprising the amino acid sequence of SEQ ID NO: 156.

[2080] In one aspect, an antibody or antigen-binding fragment thereof is provided, wherein the antibody or antigen-binding fragment thereof comprises a heavy chain variable domain (VH) having at least 90%, 91%, 92%, 93%, 94%, 95%, 96%, 97%, 98%, 99%, or 100% sequence identity to the amino acid sequence SEQ ID NO: 156. In some embodiments, a VH sequence having at least 90%, 91%, 92%, 93%, 94%, 95%, 96%, 97%, 98%, or 99% identity contains substitutions (e.g., conservative substitutions), insertions, or deletions relative to the reference sequence, but an antibody or antigen-binding fragment thereof comprising that sequence retains the ability to bind to same antigen as of the parent (e.g., cancer associated antigen). In some embodiments, a total of 1 to 10 amino acids have been substituted, inserted and/or deleted in the amino acid sequence SEQ ID NO: 156. In some embodiments, substitutions, insertions, or deletions occur in regions outside the CDRs (e.g., in the FRs). Optionally, the antibody or antigen-binding fragment thereof comprises the VH sequence SEQ ID NO: 156, including one or more post-translational modifications of that sequence. In a particular embodiment, the VH comprises one, two or three CDRs selected from: a. CDR-H1, comprising the amino acid sequence SEQ ID NO: 698, b. CDR-H2, comprising the amino acid sequence SEQ ID NO: 1240, and c. CDR-H3, comprising the amino acid sequence SEQ ID NO: 1782.

[2081] In one aspect, an antibody or antigen-binding fragment thereof is provided, wherein the antibody or antigen-binding fragment thereof comprises a light chain variable domain (VL) having at least 90%, 91%, 92%, 93%, 94%, 95%, 96%, 97%, 98%, 99%, or 100% sequence identity to the amino acid sequence SEQ ID NO: 427. In some embodiments, a VL sequence having at least 90%, 91%, 92%, 93%, 94%, 95%, 96%, 97%, 98%, or 99% identity contains substitutions (e.g., conservative substitutions), insertions, or deletions relative to the reference sequence, but an antibody or antigen-binding fragment thereof comprising that sequence retains the ability to bind to same antigen as the parent (e.g., cancer associated antigen). In some embodiments, a total of 1 to 10 amino acids have been substituted, inserted and/or deleted in the amino acid sequence SEQ ID NO: 427. In some embodiments, the substitutions, insertions, or deletions occur in regions outside the CDRs (e.g., in the FRs). Optionally, the antibody or antigen-binding fragment thereof comprises the VL sequence SEQ ID NO: 427, including one or more post-translational modifications of that sequence. In a particular embodiment, the VL comprises one, two or three CDRs selected from: a. CDR-L1, comprising the amino acid sequence SEQ ID NO: 969, b. CDR-L2, comprising the amino acid sequence SEQ ID NO: 1511, and c. CDR-L3, comprising the amino acid sequence SEQ ID NO: 2053.

[2082] In one aspect, an antibody or antigen-binding fragment thereof is provided, wherein the antibody or antigen-binding fragment thereof comprises a VH as in any of the embodiments provided above, and a VL as in any of the embodiments provided above. In some embodiments, the antibody or antigen-binding fragment thereof comprises the VH amino acid sequence of SEQ ID NO: 156, and the VL amino acid sequence of SEQ ID NO: 427, optionally including post-translational modifications of those sequences.

### TLUA1017

[2083] In one aspect, the present disclosure provides an antibody or antigen-binding fragment thereof comprising at least one or both variable regions selected from: a. VH comprising the amino acid sequence of SEQ ID NO: 157 and b. VL comprising the amino acid sequence of SEQ ID NO: 428.

[2084] In one aspect, the present disclosure provides an antibody or antigen-binding fragment thereof comprising at least one, two, three, four, five, or six CDRs selected from: a. CDR-H1 comprising the amino acid sequence of SEQ ID NO: 699, b. CDR-H2 comprising the amino acid sequence of SEQ ID NO: 1241, c. CDR-H3 comprising the amino acid sequence of SEQ ID NO: 1783, d. CDR-L1 comprising the amino acid sequence of SEQ ID NO: 970, e. CDR-L2 comprising the amino acid sequence of SEQ ID NO: 1512, and f. CDR-L3 comprising the amino acid sequence of SEQ ID NO: 2054.

[2085] In one aspect, the present disclosure provides an antibody or antigen-binding fragment thereof comprising a CDR-H3 comprising the amino acid sequence of SEQ ID NO: 1783, and a CDR-L3 comprising the amino acid sequence of SEQ ID NO: 2054.

[2086] In one aspect, the present disclosure provides an antibody or antigen-binding fragment thereof comprising at least one, at least two, or all three VH CDR sequences selected from: a. CDR-H1 comprising the amino acid sequence of SEQ ID NO: 699, b. CDR-H2 comprising the amino acid sequence of SEQ ID NO: 1241, c. CDR-H3 comprising the amino acid sequence of SEQ ID NO: 1783, and a VL comprising the amino acid sequence of SEQ ID NO: 428.

[2087] In one aspect, the present disclosure provides an antibody or antigen-binding fragment thereof comprising at least one, at least two, or all three VL CDR sequences selected from: a. CDR-L1 comprising the amino acid sequence of SEQ ID NO: 970, b. CDR-L2 comprising the amino acid sequence of SEQ ID NO: 1512, c. CDR-L3 comprising the amino acid sequence of SEQ ID NO: 2054, and a VH comprising the amino acid sequence of SEQ ID NO: 157.

[2088] In one aspect, an antibody or antigen-binding fragment thereof is provided, wherein the antibody or antigen-binding fragment thereof comprises a heavy chain variable domain (VH) having at least 90%, 91%, 92%, 93%, 94%, 95%, 96%, 97%, 98%, 99%, or 100% sequence identity to the amino acid sequence SEQ ID NO: 157. In some embodiments, a VH sequence having at least 90%, 91%, 92%, 93%, 94%, 95%, 96%, 97%, 98%, or 99% identity contains substitutions (e.g., conservative substitutions), insertions, or deletions relative to the reference sequence, but an antibody or antigen-binding fragment thereof comprising that sequence retains the ability to bind to same antigen as of the parent (e.g., cancer associated antigen). In some embodiments, a total of 1 to 10 amino acids have been substituted, inserted and/or deleted in the amino acid sequence SEQ ID NO: 157. In some embodiments, substitutions, insertions, or deletions occur in regions outside the CDRs (e.g., in the FRs). Optionally, the antibody or antigen-binding fragment thereof comprises the VH sequence SEQ ID NO: 157, including one or more post-translational modifications of that sequence. In a particular embodiment, the VH comprises one, two or three CDRs selected from: a. CDR-H1, comprising the amino acid sequence SEQ ID NO: 699, b. CDR-H2, comprising the amino acid sequence SEQ ID NO: 1241, and c. CDR-H3, comprising the amino acid sequence SEQ ID NO: 1783.

[2089] In one aspect, an antibody or antigen-binding fragment thereof is provided, wherein the antibody or antigen-binding fragment thereof comprises a light chain variable domain (VL) having at least 90%, 91%, 92%, 93%, 94%, 95%, 96%, 97%, 98%, 99%, or 100% sequence identity to the amino acid sequence SEQ ID NO: 428. In some embodiments, a VL sequence having at least 90%, 91%, 92%, 93%, 94%, 95%, 96%, 97%, 98%, or 99% identity contains substitutions (e.g., conservative substitutions), thereof comprising that sequence retains the ability to bind to same antigen as the parent (e.g., cancer associated antigen). In some embodiments, a total of 1 to 10 amino acids have been substituted, inserted and/or deleted in the amino acid sequence SEQ ID NO: 428. In some embodiments, the substitutions, insertions, or deletions occur in regions outside the CDRs (e.g., in the FRs). Optionally, the antibody or antigen-binding fragment thereof comprises the VL sequence SEQ ID NO: 428, including one or more post-translational modifications of that sequence. In a particular embodiment, the VL comprises one, two or three CDRs selected from: a. CDR-L1, comprising the amino acid sequence SEQ ID NO: 970, b. CDR-L2, comprising the amino acid sequence SEQ ID NO: 1512, and c. CDR-L3, comprising the amino acid sequence SEQ ID NO: 2054.

[2090] In one aspect, an antibody or antigen-binding fragment thereof is provided, wherein the antibody or antigen-binding fragment thereof comprises a VH as in any of the embodiments provided above, and a VL as in any of the embodiments provided above. In some embodiments, the antibody or antigen-binding fragment thereof comprises the VH amino acid sequence of SEQ ID NO: 157, and the VL amino acid sequence of SEQ ID NO: 428, optionally including post-translational modifications of those sequences.

### TLUA1018

[2091] In one aspect, the present disclosure provides an antibody or antigen-binding fragment thereof comprising at least one or both variable regions selected from: a. VH comprising the amino acid sequence of SEQ ID NO: 158 and b. VL comprising the amino acid sequence of SEQ ID NO: 429.

[2092] In one aspect, the present disclosure provides an antibody or antigen-binding fragment thereof comprising at least one, two, three, four, five, or six CDRs selected from: a. CDR-H1 comprising the amino acid sequence of SEQ ID NO: 700, b. CDR-H2 comprising the amino acid sequence of SEQ ID NO: 1242, c. CDR-H3 comprising the amino acid sequence of SEQ ID NO: 1784, d. CDR-L1 comprising the amino acid sequence of SEQ ID NO: 971, e. CDR-L2 comprising the amino acid sequence of SEQ ID NO: 1513, and f. CDR-L3 comprising the amino acid sequence of SEQ ID NO: 2055.

[2093] In one aspect, the present disclosure provides an antibody or antigen-binding fragment thereof comprising a CDR-H3 comprising the amino acid sequence of SEQ ID NO: 1784, and a CDR-L3 comprising the amino acid sequence of SEQ ID NO: 2055.

[2094] In one aspect, the present disclosure provides an antibody or antigen-binding fragment thereof comprising at least one, at least two, or all three VH CDR sequences selected from: a. CDR-H1 comprising the amino acid sequence of SEQ ID NO: 700, b. CDR-H2 comprising the amino acid sequence of SEQ ID NO: 1242, c. CDR-H3 comprising the amino acid sequence of SEQ ID NO: 1784, and a VL comprising the amino acid sequence of SEQ ID NO: 429.

[2095] In one aspect, the present disclosure provides an antibody or antigen-binding fragment thereof comprising at least one, at least two, or all three VL CDR sequences selected from: a. CDR-L1 comprising the amino acid sequence of SEQ ID NO: 971, b. CDR-L2 comprising the amino acid sequence of SEQ ID NO: 1513, c. CDR-L3 comprising the amino acid sequence of SEQ ID NO: 2055, and a VH comprising the amino acid sequence of SEQ ID NO: 158.

[2096] In one aspect, an antibody or antigen-binding fragment thereof is provided, wherein the antibody or antigen-binding fragment thereof comprises a heavy chain variable domain (VH) having at least 90%, 91%, 92%, 93%, 94%, 95%, 96%, 97%, 98%, 99%, or 100% sequence identity to the amino acid sequence SEQ ID NO: 158. In some embodiments, a VH sequence having at least 90%, 91%, 92%, 93%, 94%, 95%, 96%, 97%, 98%, or 99% identity contains substitutions (e.g., conservative substitutions), insertions, or deletions relative to the reference sequence, but an antibody or antigen-binding fragment thereof comprising that sequence retains the ability to bind to same antigen as of the parent (e.g., cancer associated antigen). In some embodiments, a total of 1 to 10 amino acids have been substituted, inserted and/or deleted in the amino acid sequence SEQ ID NO: 158. In some embodiments, substitutions, insertions, or deletions occur in regions outside the CDRs (e.g., in the FRs). Optionally, the antibody or antigen-binding fragment thereof comprises the VH sequence SEQ ID NO: 158, including one or more post-translational modifications of that sequence. In a particular embodiment, the VH comprises one, two or three CDRs selected from: a. CDR-H1, comprising the amino acid sequence SEQ ID NO: 700, b. CDR-H2, comprising the amino acid sequence SEQ ID NO: 1242, and c. CDR-H3, comprising the amino acid sequence SEQ ID NO: 1784.

[2097] In one aspect, an antibody or antigen-binding fragment thereof is provided, wherein the antibody or antigen-binding fragment thereof comprises a light chain variable domain (VL) having at least 90%, 91%, 92%, 93%, 94%, 95%, 96%, 97%, 98%, 99%, or 100% sequence identity to the amino acid sequence SEQ ID NO: 429. In some embodiments, a VL sequence having at least 90%, 91%, 92%, 93%, 94%, 95%, 96%, 97%, 98%, or 99% identity contains substitutions (e.g., conservative substitutions), insertions, or deletions relative to the reference sequence, but an antibody or antigen-binding fragment thereof comprising that sequence retains the ability to bind to same antigen as the parent (e.g., cancer associated antigen). In some embodiments, a total of 1 to 10 amino acids have been substituted, inserted and/or deleted in the amino acid sequence SEQ ID NO: 429. In some embodiments, the substitutions, insertions, or deletions occur in regions outside the CDRs (e.g., in the FRs). Optionally, the antibody or antigen-binding fragment thereof comprises the VL sequence SEQ ID NO: 429, including one or more post-translational modifications of that sequence. In a particular embodiment, the VL comprises one, two or three CDRs selected from: a. CDR-L1, comprising the amino acid sequence SEQ ID NO: 971, b. CDR-L2, comprising the amino acid sequence SEQ ID NO: 1513, and c. CDR-L3, comprising the amino acid sequence SEQ ID NO: 2055.

[2098] In one aspect, an antibody or antigen-binding fragment thereof is provided, wherein the antibody or antigen-binding fragment thereof comprises a VH as in any of the embodiments provided above, and a VL as in any of the embodiments provided above. In some embodiments, the antibody or antigen-binding fragment thereof comprises the VH amino acid sequence of SEQ ID NO: 158, and the VL amino acid sequence of SEQ ID NO: 429, optionally including post-translational modifications of those sequences.

### TLUS1001

[2099] In one aspect, the present disclosure provides an antibody or antigen-binding fragment thereof comprising at least one or both variable regions selected from: a. VH comprising the amino acid sequence of SEQ ID NO: 159 and b. VL comprising the amino acid sequence of SEQ ID NO: 430.

[2100] In one aspect, the present disclosure provides an antibody or antigen-binding fragment thereof comprising at least one, two, three, four, five, or six CDRs selected from: a. CDR-H1 comprising the amino acid sequence of SEQ ID NO: 701, b. CDR-H2 comprising the amino acid sequence of SEQ ID NO: 1243, c. CDR-H3 comprising the amino acid sequence of SEQ ID NO: 1785, d. CDR-L1 comprising the amino acid sequence of SEQ ID NO: 972, e. CDR-L2 comprising the amino acid sequence of SEQ ID NO: 1514, and f. CDR-L3 comprising the amino acid sequence of SEQ ID NO: 2056.

[2101] In one aspect, the present disclosure provides an antibody or antigen-binding fragment thereof comprising a CDR-H3 comprising the amino acid sequence of SEQ ID NO: 1785, and a CDR-L3 comprising the amino acid sequence of SEQ ID NO: 2056.

[2102] In one aspect, the present disclosure provides an antibody or antigen-binding fragment thereof comprising at least one, at least two, or all three VH CDR sequences selected from: a. CDR-H1 comprising the amino acid sequence of SEQ ID NO: 701, b. CDR-H2 comprising the amino acid sequence of SEQ ID NO: 1243, c. CDR-H3 comprising the amino acid sequence of SEQ ID NO: 1785, and a VL comprising the amino acid sequence of SEQ ID NO: 430.

[2103] In one aspect, the present disclosure provides an antibody or antigen-binding fragment thereof comprising at least one, at least two, or all three VL CDR sequences selected from: a. CDR-L1 comprising the amino acid sequence of SEQ ID NO: 972, b. CDR-L2 comprising the amino acid sequence of SEQ ID NO: 1514, c. CDR-L3 comprising the amino acid sequence of SEQ ID NO: 2056, and a VH comprising the amino acid sequence of SEQ ID NO: 159.

[2104] In one aspect, an antibody or antigen-binding fragment thereof is provided, wherein the antibody or antigen-binding fragment thereof comprises a heavy chain variable domain (VH) having at least 90%, 91%, 92%, 93%, 94%, 95%, 96%, 97%, 98%, 99%, or 100% sequence identity to the amino acid sequence SEQ ID NO: 159. In some embodiments, a VH sequence having at least 90%, 91%, 92%, 93%, 94%, 95%, 96%, 97%, 98%, or 99% identity contains substitutions (e.g., conservative substitutions), insertions, or deletions relative to the reference sequence, but an antibody or antigen-binding fragment thereof comprising that sequence retains the ability to bind to same antigen as of the parent (e.g., cancer associated antigen). In some embodiments, a total of 1 to 10 amino acids have been substituted, inserted and/or deleted in the amino acid sequence SEQ ID NO: 159. In some embodiments, substitutions, insertions, or deletions occur in regions outside the CDRs (e.g., in the FRs). Optionally, the antibody or antigen-binding fragment thereof comprises the VH sequence SEQ ID NO: 159, including one or more post-translational modifications of that sequence. In a particular embodiment, the VH comprises one, two or three CDRs selected from: a. CDR-H1, comprising the amino acid sequence SEQ ID NO: 701, b. CDR-H2, comprising the amino acid sequence SEQ ID NO: 1243, and a CDR-H3, comprising the amino acid sequence SEQ ID NO: 1785.

[2105] In one aspect, an antibody or antigen-binding fragment thereof is provided, wherein the antibody or antigen-binding fragment thereof comprises a light chain variable domain (VL) having at least 90%, 91%, 92%, 93%, 94%, 95%, 96%, 97%, 98%, 99%, or 100% sequence identity to the amino acid sequence SEQ ID NO: 430. In some embodiments, a VL sequence having at least 90%, 91%, 92%, 93%, 94%, 95%, 96%, 97%, 98%, or 99% identity contains substitutions (e.g., conservative substitutions), insertions, or deletions relative to the reference sequence, but an antibody or antigen-binding fragment thereof comprising that sequence retains the ability to bind to same antigen as the parent (e.g., cancer associated antigen). In some embodiments, a total of 1 to 10 amino acids have been substituted, inserted and/or deleted in the amino acid sequence SEQ ID NO: 430. In some embodiments, the substitutions, insertions, or deletions occur in regions outside the CDRs (e.g., in the FRs). Optionally, the antibody or antigen-binding fragment thereof comprises the VL sequence SEQ ID NO: 430, including one or more post-translational modifications of that sequence. In a particular embodiment, the VL comprises one, two or three CDRs selected from: a. CDR-L1, comprising the amino acid sequence SEQ ID NO: 972, b. CDR-L2, comprising the amino acid sequence SEQ ID NO: 1514, and c. CDR-L3, comprising the amino acid sequence SEQ ID NO: 2056.

[2106] In one aspect, an antibody or antigen-binding fragment thereof is provided, wherein the antibody or antigen-binding fragment thereof comprises a VH as in any of the embodiments provided above, and a VL as in any of the embodiments provided above. In some embodiments, the antibody or antigen-binding fragment thereof comprises the VH amino acid sequence of SEQ ID NO: 159, and the VL amino acid sequence of SEQ ID NO: 430, optionally including post-translational modifications of those sequences.

### TLUS1002

[2107] In one aspect, the present disclosure provides an antibody or antigen-binding fragment thereof comprising at least one or both variable regions selected from: a VH comprising the amino acid sequence of SEQ ID NO: 160 and b. VL comprising the amino acid sequence of SEQ ID NO: 431.

[2108] In one aspect, the present disclosure provides an antibody or antigen-binding fragment thereof comprising at least one, two, three, four, five, or six CDRs selected from: a. CDR-H1 comprising the amino acid sequence of SEQ ID NO: 702, b. CDR-H2 comprising the amino acid sequence of SEQ ID NO: 1244, c. CDR-H3 comprising the amino acid sequence of SEQ ID NO: 1786, d. CDR-L1 comprising the amino acid sequence of SEQ ID NO: 973, e. CDR-L2 comprising the amino acid sequence of SEQ ID NO: 1515, and f. CDR-L3 comprising the amino acid sequence of SEQ ID NO: 2057.

[2109] In one aspect, the present disclosure provides an antibody or antigen-binding fragment thereof comprising a CDR-H3 comprising the amino acid sequence of SEQ ID NO: 1786, and a CDR-L3 comprising the amino acid sequence of SEQ ID NO: 2057.

[2110] In one aspect, the present disclosure provides an antibody or antigen-binding fragment thereof comprising at least one, at least two, or all three VH CDR sequences selected from: a. CDR-H1 comprising the amino acid sequence of SEQ ID NO: 702, b. CDR-H2 comprising the amino acid sequence of SEQ ID NO: 1244, c. CDR-H3 comprising the amino acid sequence of SEQ ID NO: 1786, and a VL comprising the amino acid sequence of SEQ ID NO: 431.

[2111] In one aspect, the present disclosure provides an antibody or antigen-binding fragment thereof comprising at least one, at least two, or all three VL CDR sequences selected from: a. CDR-L1 comprising the amino acid sequence of SEQ ID NO: 973, b. CDR-L2 comprising the amino acid sequence of SEQ ID NO: 1515, c. CDR-L3 comprising the amino acid sequence of SEQ ID NO: 2057, and a VH comprising the amino acid sequence of SEQ ID NO: 160.

[2112] In one aspect, an antibody or antigen-binding fragment thereof is provided, wherein the antibody or antigen-binding fragment thereof comprises a heavy chain variable domain (VH) having at least 90%, 91%, 92%, 93%, 94%, 95%, 96%, 97%, 98%, 99%, or 100% sequence identity to the amino acid sequence SEQ ID NO: 160. In some embodiments, a VH sequence having at least 90%, 91%, 92%, 93%, 94%, 95%, 96%, 97%, 98%, or 99% identity contains substitutions (e.g., conservative substitutions), insertions, or deletions relative to the reference sequence, but an antibody or antigen-binding fragment thereof comprising that sequence retains the ability to bind to same antigen as of the parent (e.g., cancer associated antigen). In some embodiments, a total of 1 to 10 amino acids have been substituted, inserted and/or deleted in the amino acid sequence SEQ ID NO: 160. In some embodiments, substitutions, insertions, or deletions occur in regions outside the CDRs (e.g., in the FRs). Optionally, the antibody or antigen-binding fragment thereof comprises the VH sequence SEQ ID NO: 160, including one or more post-translational modifications of that sequence. In a particular embodiment, the VH comprises one, two or three CDRs selected from: a. CDR-H1, comprising the amino acid sequence SEQ ID NO: 702, b. CDR-H2, comprising the amino acid sequence SEQ ID NO: 1244, and c. CDR-H3, comprising the amino acid sequence SEQ ID NO: 1786.

[2113] In one aspect, an antibody or antigen-binding fragment thereof is provided, wherein the antibody or antigen-binding fragment thereof comprises a light chain variable domain (VL) having at least 90%, 91%, 92%, 93%, 94%, 95%, 96%, 97%, 98%, 99%, or 100% sequence identity to the amino acid sequence SEQ ID NO: 431. In some embodiments, a VL sequence having at least 90%, 91%, 92%, 93%, 94%, 95%, 96%, 97%, 98%, or 99% identity contains substitutions (e.g., conservative substitutions), insertions, or deletions relative to the reference sequence, but an antibody or antigen-binding fragment thereof comprising that sequence retains the ability to bind to same antigen as the parent (e.g., cancer associated antigen). In some embodiments, a total of 1 to 10 amino acids have been substituted, inserted and/or deleted in the amino acid sequence SEQ ID NO: 431. In some embodiments, the substitutions, insertions, or deletions occur in regions outside the CDRs (e.g., in the FRs). Optionally, the antibody or antigen-binding fragment thereof comprises the VL sequence SEQ ID NO: 431, including one or more post-translational modifications of that sequence. In a particular embodiment, the VL comprises one, two or three CDRs selected from: a. CDR-L1, comprising the amino acid sequence SEQ ID NO: 973, b. CDR-L2, comprising the amino acid sequence SEQ ID NO: 1515, and c. CDR-L3, comprising the amino acid sequence SEQ ID NO: 2057.

[2114] In one aspect, an antibody or antigen-binding fragment thereof is provided, wherein the antibody or antigen-binding fragment thereof comprises a VH as in any of the embodiments provided above, and a VL as in any of the embodiments provided above. In some embodiments, the antibody or antigen-binding fragment thereof comprises the VH amino acid sequence of SEQ ID NO: 160, and the VL amino acid sequence of SEQ ID NO: 431, optionally including post-translational modifications of those sequences.

### TLUS1003

[2115] In one aspect, the present disclosure provides an antibody or antigen-binding fragment thereof comprising at least one or both variable regions selected from: a. VH comprising the amino acid sequence of SEQ ID NO: 161 and b. VL comprising the amino acid sequence of SEQ ID NO: 432.

[2116] In one aspect, the present disclosure provides an antibody or antigen-binding fragment thereof comprising at least one, two, three, four, five, or six CDRs selected from: a. CDR-H1 comprising the amino acid sequence of SEQ ID NO: 703, b. CDR-H2 comprising the amino acid sequence of SEQ ID NO: 1245, c. CDR-H3 comprising the amino acid sequence of SEQ ID NO: 1787, d. CDR-L1 comprising the amino acid sequence of SEQ ID NO: 974, e. CDR-L2 comprising the amino acid sequence of SEQ ID NO: 1516, and f. CDR-L3 comprising the amino acid sequence of SEQ ID NO: 2058.

[2117] In one aspect, the present disclosure provides an antibody or antigen-binding fragment thereof comprising a CDR-H3 comprising the amino acid sequence of SEQ ID NO: 1787, and a CDR-L3 comprising the amino acid sequence of SEQ ID NO: 2058.

[2118] In one aspect, the present disclosure provides an antibody or antigen-binding fragment thereof comprising at least one, at least two, or all three VH CDR sequences selected from: a. CDR-H1 comprising the amino acid sequence of SEQ ID NO: 703, b. CDR-H2 comprising the amino acid sequence of SEQ ID NO: 1245, c. CDR-H3 comprising the amino acid sequence of SEQ ID NO: 1787, and a VL comprising the amino acid sequence of SEQ ID NO: 432.

[2119] In one aspect, the present disclosure provides an antibody or antigen-binding fragment thereof comprising at least one, at least two, or all three VL CDR sequences selected from: a. CDR-L1 comprising the amino acid sequence of SEQ ID NO: 974, b. CDR-L2 comprising the amino acid sequence of SEQ ID NO: 1516, c. CDR-L3 comprising the amino acid sequence of SEQ ID NO: 2058, and a VH comprising the amino acid sequence of SEQ ID NO: 161.

[2120] In one aspect, an antibody or antigen-binding fragment thereof is provided, wherein the antibody or antigen-binding fragment thereof comprises a heavy chain variable domain (VH) having at least 90%, 91%, 92%, 93%, 94%, 95%, 96%, 97%, 98%, 99%, or 100% sequence identity to the amino acid sequence SEQ ID NO: 161. In some embodiments, a VH sequence having at least 90%, 91%, 92%, 93%, 94%, 95%, 96%, 97%, 98%, or 99% identity contains substitutions (e.g., conservative substitutions), insertions, or deletions relative to the reference sequence, but an antibody or antigen-binding fragment thereof comprising that sequence retains the ability to bind to same antigen as of the parent (e.g., cancer associated antigen). In some embodiments, a total of 1 to 10 amino acids have been substituted, inserted and/or deleted in the amino acid sequence SEQ ID NO: 161. In some embodiments, substitutions, insertions, or deletions occur in regions outside the CDRs (e.g., in the FRs). Optionally, the antibody or antigen-binding fragment thereof comprises the VH sequence SEQ ID NO: 161, including one or more post-translational modifications of that sequence. In a particular embodiment, the VH comprises one, two or three CDRs selected from: a. CDR-H1, comprising the amino acid sequence SEQ ID NO: 703, b. CDR-H2, comprising the amino acid sequence SEQ ID NO: 1245, and c. CDR-H3, comprising the amino acid sequence SEQ ID NO: 1787.

[2121] In one aspect, an antibody or antigen-binding fragment thereof is provided, wherein the antibody or antigen-binding fragment thereof comprises a light chain variable domain (VL) having at least 90%, 91%, 92%, 93%, 94%, 95%, 96%, 97%, 98%, 99%, or 100% sequence identity to the amino acid sequence SEQ ID NO: 432. In some embodiments, a VL sequence having at least 90%, 91%, 92%, 93%, 94%, 95%, 96%, 97%, 98%, or 99% identity contains substitutions (e.g., conservative substitutions), insertions, or deletions relative to the reference sequence, but an antibody or antigen-binding fragment thereof comprising that sequence retains the ability to bind to same antigen as the parent (e.g., cancer associated antigen). In some embodiments, a total of 1 to 10 amino acids have been substituted, inserted and/or deleted in the amino acid sequence SEQ ID NO: 432. In some embodiments, the substitutions, insertions, or deletions occur in regions outside the CDRs (e.g., in the FRs). Optionally, the antibody or antigen-binding fragment thereof comprises the VL sequence SEQ ID NO: 432, including one or more post-translational modifications of that sequence. In a particular embodiment, the VL comprises one, two or three CDRs selected from: a. CDR-L1, comprising the amino acid sequence SEQ ID NO: 974, b. CDR-L2, comprising the amino acid sequence SEQ ID NO: 1516, and c. CDR-L3, comprising the amino acid sequence SEQ ID NO: 2058.

[2122] In one aspect, an antibody or antigen-binding fragment thereof is provided, wherein the antibody or antigen-binding fragment thereof comprises a VH as in any of the embodiments provided above, and a VL as in any of the embodiments provided above. In some embodiments, the antibody or antigen-binding fragment thereof comprises the VH amino acid sequence of SEQ ID NO: 161, and the VL amino acid sequence of SEQ ID NO: 432, optionally including post-translational modifications of those sequences.

### TLUS1004

[2123] In one aspect, the present disclosure provides an antibody or antigen-binding fragment thereof comprising at least one or both variable regions selected from: a. VH comprising the amino acid sequence of SEQ ID NO: 162 and b. VL comprising the amino acid sequence of SEQ ID NO: 433.

[2124] In one aspect, the present disclosure provides an antibody or antigen-binding fragment thereof comprising at least one, two, three, four, five, or six CDRs selected from: a. CDR-H1 comprising the amino acid sequence of SEQ ID NO: 704, b. CDR-H2 comprising the amino acid sequence of SEQ ID NO: 1246, c. CDR-H3 comprising the amino acid sequence of SEQ ID NO: 1788, d. CDR-L1 comprising the amino acid sequence of SEQ ID NO: 975, e. CDR-L2 comprising the amino acid sequence of SEQ ID NO: 1517, and f. CDR-L3 comprising the amino acid sequence of SEQ ID NO: 2059.

[2125] In one aspect, the present disclosure provides an antibody or antigen-binding fragment thereof comprising a CDR-H3 comprising the amino acid sequence of SEQ ID NO: 1788, and a CDR-L3 comprising the amino acid sequence of SEQ ID NO: 2059.

[2126] In one aspect, the present disclosure provides an antibody or antigen-binding fragment thereof comprising at least one, at least two, or all three VH CDR sequences selected from: a. CDR-H1 comprising the amino acid sequence of SEQ ID NO: 704, b. CDR-H2 comprising the amino acid sequence of SEQ ID NO: 1246, c. CDR-H3 comprising the amino acid sequence of SEQ ID NO: 1788, and a VL comprising the amino acid sequence of SEQ ID NO: 433.

[2127] In one aspect, the present disclosure provides an antibody or antigen-binding fragment thereof comprising at least one, at least two, or all three VL CDR sequences selected from: a. CDR-L1 comprising the amino acid sequence of SEQ ID NO: 975, b. CDR-L2 comprising the amino acid sequence of SEQ ID NO: 1517, c. CDR-L3 comprising the amino acid sequence of SEQ ID NO: 2059, and a VH comprising the amino acid sequence of SEQ ID NO: 162.

[2128] In one aspect, an antibody or antigen-binding fragment thereof is provided, wherein the antibody or antigen-binding fragment thereof comprises a heavy chain variable domain (VH) having at least 90%, 91%, 92%, 93%, 94%, 95%, 96%, 97%, 98%, 99%, or 100% sequence identity to the amino acid sequence SEQ ID NO: 162. In some embodiments, a VH sequence having at least 90%, 91%, 92%, 93%, 94%, 95%, 96%, 97%, 98%, or 99% identity contains substitutions (e.g., conservative substitutions), insertions, or deletions relative to the reference sequence, but an antibody or antigen-binding fragment thereof comprising that sequence retains the ability to bind to same antigen as of the parent (e.g., cancer associated antigen). In some embodiments, a total of 1 to 10 amino acids have been substituted, inserted and/or deleted in the amino acid sequence SEQ ID NO: 162. In some embodiments, substitutions, insertions, or deletions occur in regions outside the CDRs (e.g., in the FRs). Optionally, the antibody or antigen-binding fragment thereof comprises the VH sequence SEQ ID NO: 162, including one or more post-translational modifications of that sequence. In a particular embodiment, the VH comprises one, two or three CDRs selected from: a. CDR-H1, comprising the amino acid sequence SEQ ID NO: 704, b. CDR-H2, comprising the amino acid sequence SEQ ID NO: 1246, and c. CDR-H3, comprising the amino acid sequence SEQ ID NO: 1788.

[2129] In one aspect, an antibody or antigen-binding fragment thereof is provided, wherein the antibody or antigen-binding fragment thereof comprises a light chain variable domain (VL) having at least 90%, 91%, 92%, 93%, 94%, 95%, 96%, 97%, 98%, 99%, or 100% sequence identity to the amino acid sequence SEQ ID NO: 433. In some embodiments, a VL sequence having at least 90%, 91%, 92%, 93%, 94%, 95%, 96%, 97%, 98%, or 99% identity contains substitutions (e.g., conservative substitutions), insertions, or deletions relative to the reference sequence, but an antibody or antigen-binding fragment thereof comprising that sequence retains the ability to bind to same antigen as the parent (e.g., cancer associated antigen). In some embodiments, a total of 1 to 10 amino acids have been substituted, inserted and/or deleted in the amino acid sequence SEQ ID NO: 433. In some embodiments, the substitutions, insertions, or deletions occur in regions outside the CDRs (e.g., in the FRs). Optionally, the antibody or antigen-binding fragment thereof comprises the VL sequence SEQ ID NO: 433, including one or more post-translational modifications of that sequence. In a particular embodiment, the VL comprises one, two or three CDRs selected from: a. CDR-L1, comprising the amino acid sequence SEQ ID NO: 975, b. CDR-L2, comprising the amino acid sequence SEQ ID NO: 1517, and c. CDR-L3, comprising the amino acid sequence SEQ ID NO: 2059.

[2130] In one aspect, an antibody or antigen-binding fragment thereof is provided, wherein the antibody or antigen-binding fragment thereof comprises a VH as in any of the embodiments provided above, and a VL as in any of the embodiments provided above. In some embodiments, the antibody or antigen-binding fragment thereof comprises the VH amino acid sequence of SEQ ID NO: 162, and the VL amino acid sequence of SEQ ID NO: 433, optionally including post-translational modifications of those sequences.

### TLUS1005

[2131] In one aspect, the present disclosure provides an antibody or antigen-binding fragment thereof comprising at least one or both variable regions selected from: a. VH comprising the amino acid sequence of SEQ ID NO: 163 and b. VL comprising the amino acid sequence of SEQ ID NO: 434.

[2132] In one aspect, the present disclosure provides an antibody or antigen-binding fragment thereof comprising at least one, two, three, four, five, or six CDRs selected from: a. CDR-H1 comprising the amino acid sequence of SEQ ID NO: 705, b. CDR-H2 comprising the amino acid sequence of SEQ ID NO: 1247, c. CDR-H3 comprising the amino acid sequence of SEQ ID NO: 1789, d. CDR-L1 comprising the amino acid sequence of SEQ ID NO: 976, e. CDR-L2 comprising the amino acid sequence of SEQ ID NO: 1518, and f. CDR-L3 comprising the amino acid sequence of SEQ ID NO: 2060.

[2133] In one aspect, the present disclosure provides an antibody or antigen-binding fragment thereof comprising a CDR-H3 comprising the amino acid sequence of SEQ ID NO: 1789, and a CDR-L3 comprising the amino acid sequence of SEQ ID NO: 2060.

[2134] In one aspect, the present disclosure provides an antibody or antigen-binding fragment thereof comprising at least one, at least two, or all three VH CDR sequences selected from: a. CDR-H1 comprising the amino acid sequence of SEQ ID NO: 705, b. CDR-H2 comprising the amino acid sequence of SEQ ID NO: 1247, c. CDR-H3 comprising the amino acid sequence of SEQ ID NO: 1789, and a VL comprising the amino acid sequence of SEQ ID NO: 434.

[2135] In one aspect, the present disclosure provides an antibody or antigen-binding fragment thereof comprising at least one, at least two, or all three VL CDR sequences selected from: a. CDR-L1 comprising the amino acid sequence of SEQ ID NO: 976, b. CDR-L2 comprising the amino acid sequence of SEQ ID NO: 1518, c. CDR-L3 comprising the amino acid sequence of SEQ ID NO: 2060, and a VH comprising the amino acid sequence of SEQ ID NO: 163.

[2136] In one aspect, an antibody or antigen-binding fragment thereof is provided, wherein the antibody or antigen-binding fragment thereof comprises a heavy chain variable domain (VH) having at least 90%, 91%, 92%, 93%, 94%, 95%, 96%, 97%, 98%, 99%, or 100% sequence identity to the amino acid sequence SEQ ID NO: 163. In some embodiments, a VH sequence having at least 90%, 91%, 92%, 93%, 94%, 95%, 96%, 97%, 98%, or 99% identity contains substitutions (e.g., conservative substitutions), insertions, or deletions relative to the reference sequence, but an antibody or antigen-binding fragment thereof comprising that sequence retains the ability to bind to same antigen as of the parent (e.g., cancer associated antigen). In some embodiments, a total of 1 to 10 amino acids have been substituted, inserted and/or deleted in the amino acid sequence SEQ ID NO: 163. In some embodiments, substitutions, antigen-binding fragment thereof comprises the VH sequence SEQ ID NO: 163, including one or more post-translational modifications of that sequence. In a particular embodiment, the VH comprises one, two or three CDRs selected from: a. CDR-H1, comprising the amino acid sequence SEQ ID NO: 705, b. CDR-H2, comprising the amino acid sequence SEQ ID NO: 1247, and c. CDR-H3, comprising the amino acid sequence SEQ ID NO: 1789.

[2137] In one aspect, an antibody or antigen-binding fragment thereof is provided, wherein the antibody or antigen-binding fragment thereof comprises a light chain variable domain (VL) having at least 90%, 91%, 92%, 93%, 94%, 95%, 96%, 97%, 98%, 99%, or 100% sequence identity to the amino acid sequence SEQ ID NO: 434. In some embodiments, a VL sequence having at least 90%, 91%, 92%, 93%, 94%, 95%, 96%, 97%, 98%, or 99% identity contains substitutions (e.g., conservative substitutions), insertions, or deletions relative to the reference sequence, but an antibody or antigen-binding fragment thereof comprising that sequence retains the ability to bind to same antigen as the parent (e.g., cancer associated antigen). In some embodiments, a total of 1 to 10 amino acids have been substituted, inserted and/or deleted in the amino acid sequence SEQ ID NO: 434. In some embodiments, the substitutions, insertions, or deletions occur in regions outside the CDRs (e.g., in the FRs). Optionally, the antibody or antigen-binding fragment thereof comprises the VL sequence SEQ ID NO: 434, including one or more post-translational modifications of that sequence. In a particular embodiment, the VL comprises one, two or three CDRs selected from: a. CDR-L1, comprising the amino acid sequence SEQ ID NO: 976, b. CDR-L2, comprising the amino acid sequence SEQ ID NO: 1518, and c. CDR-L3, comprising the amino acid sequence SEQ ID NO: 2060.

[2138] In one aspect, an antibody or antigen-binding fragment thereof is provided, wherein the antibody or antigen-binding fragment thereof comprises a VH as in any of the embodiments provided above, and a VL as in any of the embodiments provided above. In some embodiments, the antibody or antigen-binding fragment thereof comprises the VH amino acid sequence of SEQ ID NO: 163, and the VL amino acid sequence of SEQ ID NO: 434, optionally including post-translational modifications of those sequences.

### TLUS1006

[2139] In one aspect, the present disclosure provides an antibody or antigen-binding fragment thereof comprising at least one or both variable regions selected from: a. VH comprising the amino acid sequence of SEQ ID NO: 164 and b. VL comprising the amino acid sequence of SEQ ID NO: 435.

[2140] In one aspect, the present disclosure provides an antibody or antigen-binding fragment thereof comprising at least one, two, three, four, five, or six CDRs selected from: a. CDR-H1 comprising the amino acid sequence of SEQ ID NO: 706, b. CDR-H2 comprising the amino acid sequence of SEQ ID NO: 1248, c. CDR-H3 comprising the amino acid sequence of SEQ ID NO: 1790, d. CDR-L1 comprising the amino acid sequence of SEQ ID NO: 977, e. CDR-L2 comprising the amino acid sequence of SEQ ID NO: 1519, and f. CDR-L3 comprising the amino acid sequence of SEQ ID NO: 2061.

[2141] In one aspect, the present disclosure provides an antibody or antigen-binding fragment thereof comprising a CDR-H3 comprising the amino acid sequence of SEQ ID NO: 1790, and a CDR-L3 comprising the amino acid sequence of SEQ ID NO: 2061.

[2142] In one aspect, the present disclosure provides an antibody or antigen-binding fragment thereof comprising at least one, at least two, or all three VH CDR sequences selected from: a. CDR-H1 comprising the amino acid sequence of SEQ ID NO: 706, b. CDR-H2 comprising the amino acid sequence of SEQ ID NO: 1248, c. CDR-H3 comprising the amino acid sequence of SEQ ID NO: 1790, and a VL comprising the amino acid sequence of SEQ ID NO: 435.

[2143] In one aspect, the present disclosure provides an antibody or antigen-binding fragment thereof comprising at least one, at least two, or all three VL CDR sequences selected from: a. CDR-L1 comprising the amino acid sequence of SEQ ID NO: 977, b. CDR-L2 comprising the amino acid sequence of SEQ ID NO: 1519, c. CDR-L3 comprising the amino acid sequence of SEQ ID NO: 2061, and a VH comprising the amino acid sequence of SEQ ID NO: 164.

[2144] In one aspect, an antibody or antigen-binding fragment thereof is provided, wherein the antibody or antigen-binding fragment thereof comprises a heavy chain variable domain (VH) having at least 90%, 91%, 92%, 93%, 94%, 95%, 96%, 97%, 98%, 99%, or 100% sequence identity to the amino acid sequence SEQ ID NO: 164. In some embodiments, a VH sequence having at least 90%, 91%, 92%, 93%, 94%, 95%, 96%, 97%, 98%, or 99% identity contains substitutions (e.g., conservative substitutions), insertions, or deletions relative to the reference sequence, but an antibody or antigen-binding fragment thereof comprising that sequence retains the ability to bind to same antigen as of the parent (e.g., cancer associated antigen). In some embodiments, a total of 1 to 10 amino acids have been substituted, inserted and/or deleted in the amino acid sequence SEQ ID NO: 164. In some embodiments, substitutions, insertions, or deletions occur in regions outside the CDRs (e.g., in the FRs). Optionally, the antibody or antigen-binding fragment thereof comprises the VH sequence SEQ ID NO: 164, including one or more post-translational modifications of that sequence. In a particular embodiment, the VH comprises one, two or three CDRs selected from: a. CDR-H1, comprising the amino acid sequence SEQ ID NO: 706, b. CDR-H2, comprising the amino acid sequence SEQ ID NO: 1248, and c. CDR-H3, comprising the amino acid sequence SEQ ID NO: 1790.

[2145] In one aspect, an antibody or antigen-binding fragment thereof is provided, wherein the antibody or antigen-binding fragment thereof comprises a light chain variable domain (VL) having at least 90%, 91%, 92%, 93%, 94%, 95%, 96%, 97%, 98%, 99%, or 100% sequence identity to the amino acid sequence SEQ ID NO: 435. In some embodiments, a VL sequence having at least 90%, 91%, 92%, 93%, 94%, 95%, 96%, 97%, 98%, or 99% identity contains substitutions (e.g., conservative substitutions), insertions, or deletions relative to the reference sequence, but an antibody or antigen-binding fragment thereof comprising that sequence retains the ability to bind to same antigen as the parent (e.g., cancer associated antigen). In some embodiments, a total of 1 to 10 amino acids have been substituted, inserted and/or deleted in the amino acid sequence SEQ ID NO: 435. In some embodiments, the substitutions, insertions, or deletions occur in regions outside the CDRs (e.g., in the FRs). Optionally, the antibody or antigen-binding fragment thereof comprises the VL sequence SEQ ID NO: 435, including one or more post-translational modifications of that sequence. In a particular embodiment, the VL comprises one, two or three CDRs selected from: a. CDR-L1, comprising the amino acid sequence SEQ ID NO: 977, b. CDR-L2, comprising the amino acid sequence SEQ ID NO: 1519, and c. CDR-L3, comprising the amino acid sequence SEQ ID NO: 2061.

[2146] In one aspect, an antibody or antigen-binding fragment thereof is provided, wherein the antibody or antigen-binding fragment thereof comprises a VH as in any of the embodiments provided above, and a VL as in any of the embodiments provided above. In some embodiments, the antibody or antigen-binding fragment thereof comprises the VH amino acid sequence of SEQ ID NO: 164, and the VL amino acid sequence of SEQ ID NO: 435, optionally including post-translational modifications of those sequences.

### TLUS1007

[2147] In one aspect, the present disclosure provides an antibody or antigen-binding fragment thereof comprising at least one or both variable regions selected from: a. VH comprising the amino acid sequence of SEQ ID NO: 165 and b. VL comprising the amino acid sequence of SEQ ID NO: 436.

[2148] In one aspect, the present disclosure provides an antibody or antigen-binding fragment thereof comprising at least one, two, three, four, five, or six CDRs selected from: a. CDR-H1 comprising the amino acid sequence of SEQ ID NO: 707, b. CDR-H2 comprising the amino acid sequence of SEQ ID NO: 1249, c. CDR-H3 comprising the amino acid sequence of SEQ ID NO: 1791, d. CDR-L1 comprising the amino acid sequence of SEQ ID NO: 978, e. CDR-L2 comprising the amino acid sequence of SEQ ID NO: 1520, and f. CDR-L3 comprising the amino acid sequence of SEQ ID NO: 2062.

[2149] In one aspect, the present disclosure provides an antibody or antigen-binding fragment thereof comprising a CDR-H3 comprising the amino acid sequence of SEQ ID NO: 1791, and a CDR-L3 comprising the amino acid sequence of SEQ ID NO: 2062.

[2150] In one aspect, the present disclosure provides an antibody or antigen-binding fragment thereof comprising at least one, at least two, or all three VH CDR sequences selected from: a. CDR-H1 comprising the amino acid sequence of SEQ ID NO: 707, b. CDR-H2 comprising the amino acid sequence of SEQ ID NO: 1249, c. CDR-H3 comprising the amino acid sequence of SEQ ID NO: 1791, and a VL comprising the amino acid sequence of SEQ ID NO: 436.

[2151] In one aspect, the present disclosure provides an antibody or antigen-binding fragment thereof comprising at least one, at least two, or all three VL CDR sequences selected from: a. CDR-L1 comprising the amino acid sequence of SEQ ID NO: 978, b. CDR-L2 comprising the amino acid sequence of SEQ ID NO: 1520, c. CDR-L3 comprising the amino acid sequence of SEQ ID NO: 2062, and a VH comprising the amino acid sequence of SEQ ID NO: 165.

[2152] In one aspect, an antibody or antigen-binding fragment thereof is provided, wherein the antibody or antigen-binding fragment thereof comprises a heavy chain variable domain (VH) having at least 90%, 91%, 92%, 93%, 94%, 95%, 96%, 97%, 98%, 99%, or 100% sequence identity to the amino acid sequence SEQ ID NO: 165. In some embodiments, a VH sequence having at least 90%, 91%, 92%, 93%, 94%, 95%, 96%, 97%, 98%, or 99% identity contains substitutions (e.g., conservative substitutions), insertions, or deletions relative to the reference sequence, but an antibody or antigen-binding fragment thereof comprising that sequence retains the ability to bind to same antigen as of the parent (e.g., cancer associated antigen). In some embodiments, a total of 1 to 10 amino acids have been substituted, inserted and/or deleted in the amino acid sequence SEQ ID NO: 165. In some embodiments, substitutions, insertions, or deletions occur in regions outside the CDRs (e.g., in the FRs). Optionally, the antibody or antigen-binding fragment thereof comprises the VH sequence SEQ ID NO: 165, including one or more post-translational modifications of that sequence. In a particular embodiment, the VH comprises one, two or three CDRs selected from: a. CDR-H1, comprising the amino acid sequence SEQ ID NO: 707, b. CDR-H2, comprising the amino acid sequence SEQ ID NO: 1249, and c. CDR-H3, comprising the amino acid sequence SEQ ID NO: 1791.

[2153] In one aspect, an antibody or antigen-binding fragment thereof is provided, wherein the antibody or antigen-binding fragment thereof comprises a light chain variable domain (VL) having at least 90%, 91%, 92%, 93%, 94%, 95%, 96%, 97%, 98%, 99%, or 100% sequence identity to the amino acid sequence SEQ ID NO: 436. In some embodiments, a VL sequence having at least 90%, 91%, 92%, 93%, 94%, 95%, 96%, 97%, 98%, or 99% identity contains substitutions (e.g., conservative substitutions), insertions, or deletions relative to the reference sequence, but an antibody or antigen-binding fragment thereof comprising that sequence retains the ability to bind to same antigen as the parent (e.g., cancer associated antigen). In some embodiments, a total of 1 to 10 amino acids have been substituted, inserted and/or deleted in the amino acid sequence SEQ ID NO: 436. In some embodiments, the substitutions, insertions, or deletions occur in regions outside the CDRs (e.g., in the FRs). Optionally, the antibody or antigen-binding fragment thereof comprises the VL sequence SEQ ID NO: 436, including one or more post-translational modifications of that sequence. In a particular embodiment, the VL comprises one, two or three CDRs selected from: a. CDR-L1, comprising the amino acid sequence SEQ ID NO: 978, b. CDR-L2, comprising the amino acid sequence SEQ ID NO: 1520, and c. CDR-L3, comprising the amino acid sequence SEQ ID NO: 2062.

[2154] In one aspect, an antibody or antigen-binding fragment thereof is provided, wherein the antibody or antigen-binding fragment thereof comprises a VH as in any of the embodiments provided above, and a VL as in any of the embodiments provided above. In some embodiments, the antibody or antigen-binding fragment thereof comprises the VH amino acid sequence of SEQ ID NO: 165, and the VL amino acid sequence of SEQ ID NO: 436, optionally including post-translational modifications of those sequences.

### TLUS1008

[2155] In one aspect, the present disclosure provides an antibody or antigen-binding fragment thereof comprising at least one or both variable regions selected from: a. VH comprising the amino acid sequence of SEQ ID NO: 166 and b. VL comprising the amino acid sequence of SEQ ID NO: 437.

[2156] In one aspect, the present disclosure provides an antibody or antigen-binding fragment thereof comprising at least one, two, three, four, five, or six CDRs selected from: a. CDR-H1 comprising the amino acid sequence of SEQ ID NO: 708, b. CDR-H2 comprising the amino acid sequence of SEQ ID NO: 1250, c. CDR-H3 comprising the amino acid sequence of SEQ ID NO: 1792, d. CDR-L1 comprising the amino acid sequence of SEQ ID NO: 979, e. CDR-L2 comprising the amino acid sequence of SEQ ID NO: 1521, and f. CDR-L3 comprising the amino acid sequence of SEQ ID NO: 2063.

[2157] In one aspect, the present disclosure provides an antibody or antigen-binding fragment thereof comprising a CDR-H3 comprising the amino acid sequence of SEQ ID NO: 1792, and a CDR-L3 comprising the amino acid sequence of SEQ ID NO: 2063.

[2158] In one aspect, the present disclosure provides an antibody or antigen-binding fragment thereof comprising at least one, at least two, or all three VH CDR sequences selected from: a. CDR-H1 comprising the amino acid sequence of SEQ ID NO: 708, b. CDR-H2 comprising the amino acid sequence of SEQ ID NO: 1250, c. CDR-H3 comprising the amino acid sequence of SEQ ID NO: 1792, and a VL comprising the amino acid sequence of SEQ ID NO: 437.

[2159] In one aspect, the present disclosure provides an antibody or antigen-binding fragment thereof comprising at least one, at least two, or all three VL CDR sequences selected from: a. CDR-L1 comprising the amino acid sequence of SEQ ID NO: 979, b. CDR-L2 comprising the amino acid sequence of SEQ ID NO: 1521, c. CDR-L3 comprising the amino acid sequence of SEQ ID NO: 2063, and a VH comprising the amino acid sequence of SEQ ID NO: 166.

[2160] In one aspect, an antibody or antigen-binding fragment thereof is provided, wherein the antibody or antigen-binding fragment thereof comprises a heavy chain variable domain (VH) having at least 90%, 91%, 92%, 93%, 94%, 95%, 96%, 97%, 98%, 99%, or 100% sequence identity to the amino acid sequence SEQ ID NO: 166. In some embodiments, a VH sequence having at least 90%, 91%, 92%, 93%, 94%, 95%, 96%, 97%, 98%, or 99% identity contains substitutions (e.g., conservative substitutions), insertions, or deletions relative to the reference sequence, but an antibody or antigen-binding fragment thereof comprising that sequence retains the ability to bind to same antigen as of the parent (e.g., cancer associated antigen). In some embodiments, a total of 1 to 10 amino acids have been substituted, inserted and/or deleted in the amino acid sequence SEQ ID NO: 166. In some embodiments, substitutions, insertions, or deletions occur in regions outside the CDRs (e.g., in the FRs). Optionally, the antibody or antigen-binding fragment thereof comprises the VH sequence SEQ ID NO: 166, including one or more post-translational modifications of that sequence. In a particular embodiment, the VH comprises one, two or three CDRs selected from: a. CDR-H1, comprising the amino acid sequence SEQ ID NO: 708, b. CDR-H2, comprising the amino acid sequence SEQ ID NO: 1250, and c. CDR-H3, comprising the amino acid sequence SEQ ID NO: 1792.

[2161] In one aspect, an antibody or antigen-binding fragment thereof is provided, wherein the antibody or antigen-binding fragment thereof comprises a light chain variable domain (VL) having at least 90%, 91%, 92%, 93%, 94%, 95%, 96%, 97%, 98%, 99%, or 100% sequence identity to the amino acid sequence SEQ ID NO: 437. In some embodiments, a VL sequence having at least 90%, 91%, 92%, 93%, 94%, 95%, 96%, 97%, 98%, or 99% identity contains substitutions (e.g., conservative substitutions), insertions, or deletions relative to the reference sequence, but an antibody or antigen-binding fragment thereof comprising that sequence retains the ability to bind to same antigen as the parent (e.g., cancer associated antigen). In some embodiments, a total of 1 to 10 amino acids have been substituted, inserted and/or deleted in the amino acid sequence SEQ ID NO: 437. In some embodiments, the substitutions, antigen-binding fragment thereof comprises the VL sequence SEQ ID NO: 437, including one or more post-translational modifications of that sequence. In a particular embodiment, the VL comprises one, two or three CDRs selected from: a. CDR-L1, comprising the amino acid sequence SEQ ID NO: 979, b. CDR-L2, comprising the amino acid sequence SEQ ID NO: 1521, and c. CDR-L3, comprising the amino acid sequence SEQ ID NO: 2063.

[2162] In one aspect, an antibody or antigen-binding fragment thereof is provided, wherein the antibody or antigen-binding fragment thereof comprises a VH as in any of the embodiments provided above, and a VL as in any of the embodiments provided above. In some embodiments, the antibody or antigen-binding fragment thereof comprises the VH amino acid sequence of SEQ ID NO: 166, and the VL amino acid sequence of SEQ ID NO: 437, optionally including post-translational modifications of those sequences.

### TLUS1009

[2163] In one aspect, the present disclosure provides an antibody or antigen-binding fragment thereof comprising at least one or both variable regions selected from: a. VH comprising the amino acid sequence of SEQ ID NO: 167 and b. VL comprising the amino acid sequence of SEQ ID NO: 438.

[2164] In one aspect, the present disclosure provides an antibody or antigen-binding fragment thereof comprising at least one, two, three, four, five, or six CDRs selected from: a. CDR-H1 comprising the amino acid sequence of SEQ ID NO: 709, b. CDR-H2 comprising the amino acid sequence of SEQ ID NO: 1251, c. CDR-H3 comprising the amino acid sequence of SEQ ID NO: 1793, d. CDR-L1 comprising the amino acid sequence of SEQ ID NO: 980, e. CDR-L2 comprising the amino acid sequence of SEQ ID NO: 1522, and f. CDR-L3 comprising the amino acid sequence of SEQ ID NO: 2064.

[2165] In one aspect, the present disclosure provides an antibody or antigen-binding fragment thereof comprising a CDR-H3 comprising the amino acid sequence of SEQ ID NO: 1793, and a CDR-L3 comprising the amino acid sequence of SEQ ID NO: 2064.

[2166] In one aspect, the present disclosure provides an antibody or antigen-binding fragment thereof comprising at least one, at least two, or all three VH CDR sequences selected from: a. CDR-H1 comprising the amino acid sequence of SEQ ID NO: 709, b. CDR-H2 comprising the amino acid sequence of SEQ ID NO: 1251, c. CDR-H3 comprising the amino acid sequence of SEQ ID NO: 1793, and a VL comprising the amino acid sequence of SEQ ID NO: 438.

[2167] In one aspect, the present disclosure provides an antibody or antigen-binding fragment thereof comprising at least one, at least two, or all three VL CDR sequences selected from: a. CDR-L1 comprising the amino acid sequence of SEQ ID NO: 980, b. CDR-L2 comprising the amino acid sequence of SEQ ID NO: 1522, c. CDR-L3 comprising the amino acid sequence of SEQ ID NO: 2064, and a VH comprising the amino acid sequence of SEQ ID NO: 167.

[2168] In one aspect, an antibody or antigen-binding fragment thereof is provided, wherein the antibody or antigen-binding fragment thereof comprises a heavy chain variable domain (VH) having at least 90%, 91%, 92%, 93%, 94%, 95%, 96%, 97%, 98%, 99%, or 100% sequence identity to the amino acid sequence SEQ ID NO: 167. In some embodiments, a VH sequence having at least 90%, 91%, 92%, 93%, 94%, 95%, 96%, 97%, 98%, or 99% identity contains substitutions (e.g., conservative substitutions), thereof comprising that sequence retains the ability to bind to same antigen as of the parent (e.g., cancer associated antigen). In some embodiments, a total of 1 to 10 amino acids have been substituted, inserted and/or deleted in the amino acid sequence SEQ ID NO: 167. In some embodiments, substitutions, insertions, or deletions occur in regions outside the CDRs (e.g., in the FRs). Optionally, the antibody or antigen-binding fragment thereof comprises the VH sequence SEQ ID NO: 167, including one or more post-translational modifications of that sequence. In a particular embodiment, the VH comprises one, two or three CDRs selected from: a. CDR-H1, comprising the amino acid sequence SEQ ID NO: 709, b. CDR-H2, comprising the amino acid sequence SEQ ID NO: 1251, and c. CDR-H3, comprising the amino acid sequence SEQ ID NO: 1793.

[2169] In one aspect, an antibody or antigen-binding fragment thereof is provided, wherein the antibody or antigen-binding fragment thereof comprises a light chain variable domain (VL) having at least 90%, 91%, 92%, 93%, 94%, 95%, 96%, 97%, 98%, 99%, or 100% sequence identity to the amino acid sequence SEQ ID NO: 438. In some embodiments, a VL sequence having at least 90%, 91%, 92%, 93%, 94%, 95%, 96%, 97%, 98%, or 99% identity contains substitutions (e.g., conservative substitutions), insertions, or deletions relative to the reference sequence, but an antibody or antigen-binding fragment thereof comprising that sequence retains the ability to bind to same antigen as the parent (e.g., cancer associated antigen). In some embodiments, a total of 1 to 10 amino acids have been substituted, inserted and/or deleted in the amino acid sequence SEQ ID NO: 438. In some embodiments, the substitutions, insertions, or deletions occur in regions outside the CDRs (e.g., in the FRs). Optionally, the antibody or antigen-binding fragment thereof comprises the VL sequence SEQ ID NO: 438, including one or more post-translational modifications of that sequence. In a particular embodiment, the VL comprises one, two or three CDRs selected from: a. CDR-L1, comprising the amino acid sequence SEQ ID NO: 980, b. CDR-L2, comprising the amino acid sequence SEQ ID NO: 1522, and c. CDR-L3, comprising the amino acid sequence SEQ ID NO: 2064.

[2170] In one aspect, an antibody or antigen-binding fragment thereof is provided, wherein the antibody or antigen-binding fragment thereof comprises a VH as in any of the embodiments provided above, and a VL as in any of the embodiments provided above. In some embodiments, the antibody or antigen-binding fragment thereof comprises the VH amino acid sequence of SEQ ID NO: 167, and the VL amino acid sequence of SEQ ID NO: 438, optionally including post-translational modifications of those sequences.

### TLUS1010

[2171] In one aspect, the present disclosure provides an antibody or antigen-binding fragment thereof comprising at least one or both variable regions selected from: a. VH comprising the amino acid sequence of SEQ ID NO: 168 and b. VL comprising the amino acid sequence of SEQ ID NO: 439.

[2172] In one aspect, the present disclosure provides an antibody or antigen-binding fragment thereof comprising at least one, two, three, four, five, or six CDRs selected from: a. CDR-H1 comprising the amino acid sequence of SEQ ID NO: 710, b. CDR-H2 comprising the amino acid sequence of SEQ ID NO: 1252, c. CDR-H3 comprising the amino acid sequence of SEQ ID NO: 1794, d. CDR-L1 comprising the amino acid sequence of SEQ ID NO: 981, e. CDR-L2 comprising the amino acid sequence of SEQ ID NO: 1523, and f. CDR-L3 comprising the amino acid sequence of SEQ ID NO: 2065.

[2173] In one aspect, the present disclosure provides an antibody or antigen-binding fragment thereof comprising a CDR-H3 comprising the amino acid sequence of SEQ ID NO: 1794, and a CDR-L3 comprising the amino acid sequence of SEQ ID NO: 2065.

[2174] In one aspect, the present disclosure provides an antibody or antigen-binding fragment thereof comprising at least one, at least two, or all three VH CDR sequences selected from: a. CDR-H1 comprising the amino acid sequence of SEQ ID NO: 710, b. CDR-H2 comprising the amino acid sequence of SEQ ID NO: 1252, c. CDR-H3 comprising the amino acid sequence of SEQ ID NO: 1794, and a VL comprising the amino acid sequence of SEQ ID NO: 439.

[2175] In one aspect, the present disclosure provides an antibody or antigen-binding fragment thereof comprising at least one, at least two, or all three VL CDR sequences selected from: a. CDR-L1 comprising the amino acid sequence of SEQ ID NO: 981, b. CDR-L2 comprising the amino acid sequence of SEQ ID NO: 1523, c. CDR-L3 comprising the amino acid sequence of SEQ ID NO: 2065, and a VH comprising the amino acid sequence of SEQ ID NO: 168.

[2176] In one aspect, an antibody or antigen-binding fragment thereof is provided, wherein the antibody or antigen-binding fragment thereof comprises a heavy chain variable domain (VH) having at least 90%, 91%, 92%, 93%, 94%, 95%, 96%, 97%, 98%, 99%, or 100% sequence identity to the amino acid sequence SEQ ID NO: 168. In some embodiments, a VH sequence having at least 90%, 91%, 92%, 93%, 94%, 95%, 96%, 97%, 98%, or 99% identity contains substitutions (e.g., conservative substitutions), insertions, or deletions relative to the reference sequence, but an antibody or antigen-binding fragment thereof comprising that sequence retains the ability to bind to same antigen as of the parent (e.g., cancer associated antigen). In some embodiments, a total of 1 to 10 amino acids have been substituted, inserted and/or deleted in the amino acid sequence SEQ ID NO: 168. In some embodiments, substitutions, insertions, or deletions occur in regions outside the CDRs (e.g., in the FRs). Optionally, the antibody or antigen-binding fragment thereof comprises the VH sequence SEQ ID NO: 168, including one or more post-translational modifications of that sequence. In a particular embodiment, the VH comprises one, two or three CDRs selected from: a. CDR-H1, comprising the amino acid sequence SEQ ID NO: 710, b. CDR-H2, comprising the amino acid sequence SEQ ID NO: 1252, and c. CDR-H3, comprising the amino acid sequence SEQ ID NO: 1794.

[2177] In one aspect, an antibody or antigen-binding fragment thereof is provided, wherein the antibody or antigen-binding fragment thereof comprises a light chain variable domain (VL) having at least 90%, 91%, 92%, 93%, 94%, 95%, 96%, 97%, 98%, 99%, or 100% sequence identity to the amino acid sequence SEQ ID NO: 439. In some embodiments, a VL sequence having at least 90%, 91%, 92%, 93%, 94%, 95%, 96%, 97%, 98%, or 99% identity contains substitutions (e.g., conservative substitutions), insertions, or deletions relative to the reference sequence, but an antibody or antigen-binding fragment thereof comprising that sequence retains the ability to bind to same antigen as the parent (e.g., cancer associated antigen). In some embodiments, a total of 1 to 10 amino acids have been substituted, inserted and/or deleted in the amino acid sequence SEQ ID NO: 439. In some embodiments, the substitutions, insertions, or deletions occur in regions outside the CDRs (e.g., in the FRs). Optionally, the antibody or antigen-binding fragment thereof comprises the VL sequence SEQ ID NO: 439, including one or more post-translational modifications of that sequence. In a particular embodiment, the VL comprises one, two or three CDRs selected from: a. CDR-L1, comprising the amino acid sequence SEQ ID NO: 981, b. CDR-L2, comprising the amino acid sequence SEQ ID NO: 1523, and c. CDR-L3, comprising the amino acid sequence SEQ ID NO: 2065.

[2178] In one aspect, an antibody or antigen-binding fragment thereof is provided, wherein the antibody or antigen-binding fragment thereof comprises a VH as in any of the embodiments provided above, and a VL as in any of the embodiments provided above. In some embodiments, the antibody or antigen-binding fragment thereof comprises the VH amino acid sequence of SEQ ID NO: 168, and the VL amino acid sequence of SEQ ID NO: 439, optionally including post-translational modifications of those sequences.

### TLUS1011

[2179] In one aspect, the present disclosure provides an antibody or antigen-binding fragment thereof comprising at least one or both variable regions selected from: a. VH comprising the amino acid sequence of SEQ ID NO: 169 and b. VL comprising the amino acid sequence of SEQ ID NO: 440.

[2180] In one aspect, the present disclosure provides an antibody or antigen-binding fragment thereof comprising at least one, two, three, four, five, or six CDRs selected from: a. CDR-H1 comprising the amino acid sequence of SEQ ID NO: 711, b. CDR-H2 comprising the amino acid sequence of SEQ ID NO: 1253, c. CDR-H3 comprising the amino acid sequence of SEQ ID NO: 1795, d. CDR-L1 comprising the amino acid sequence of SEQ ID NO: 982, e. CDR-L2 comprising the amino acid sequence of SEQ ID NO: 1524, and f. CDR-L3 comprising the amino acid sequence of SEQ ID NO: 2066.

[2181] In one aspect, the present disclosure provides an antibody or antigen-binding fragment thereof comprising a CDR-H3 comprising the amino acid sequence of SEQ ID NO: 1795, and a CDR-L3 comprising the amino acid sequence of SEQ ID NO: 2066.

[2182] In one aspect, the present disclosure provides an antibody or antigen-binding fragment thereof comprising at least one, at least two, or all three VH CDR sequences selected from: a. CDR-H1 comprising the amino acid sequence of SEQ ID NO: 711, b. CDR-H2 comprising the amino acid sequence of SEQ ID NO: 1253, c. CDR-H3 comprising the amino acid sequence of SEQ ID NO: 1795, and a VL comprising the amino acid sequence of SEQ ID NO: 440.

[2183] In one aspect, the present disclosure provides an antibody or antigen-binding fragment thereof comprising at least one, at least two, or all three VL CDR sequences selected from: a. CDR-L1 comprising the amino acid sequence of SEQ ID NO: 982, b. CDR-L2 comprising the amino acid sequence of SEQ ID NO: 1524, c. CDR-L3 comprising the amino acid sequence of SEQ ID NO: 2066, and a VH comprising the amino acid sequence of SEQ ID NO: 169.

[2184] In one aspect, an antibody or antigen-binding fragment thereof is provided, wherein the antibody or antigen-binding fragment thereof comprises a heavy chain variable domain (VH) having at least 90%, 91%, 92%, 93%, 94%, 95%, 96%, 97%, 98%, 99%, or 100% sequence identity to the amino acid sequence SEQ ID NO: 169. In some embodiments, a VH sequence having at least 90%, 91%, 92%, 93%, 94%, 95%, 96%, 97%, 98%, or 99% identity contains substitutions (e.g., conservative substitutions), insertions, or deletions relative to the reference sequence, but an antibody or antigen-binding fragment thereof comprising that sequence retains the ability to bind to same antigen as of the parent (e.g., cancer associated antigen). In some embodiments, a total of 1 to 10 amino acids have been substituted, inserted and/or deleted in the amino acid sequence SEQ ID NO: 169. In some embodiments, substitutions, insertions, or deletions occur in regions outside the CDRs (e.g., in the FRs). Optionally, the antibody or antigen-binding fragment thereof comprises the VH sequence SEQ ID NO: 169, including one or more post-translational modifications of that sequence. In a particular embodiment, the VH comprises one, two or three CDRs selected from: a. CDR-H1, comprising the amino acid sequence SEQ ID NO: 711, b. CDR-H2, comprising the amino acid sequence SEQ ID NO: 1253, and c. CDR-H3, comprising the amino acid sequence SEQ ID NO: 1795.

[2185] In one aspect, an antibody or antigen-binding fragment thereof is provided, wherein the antibody or antigen-binding fragment thereof comprises a light chain variable domain (VL) having at least 90%, 91%, 92%, 93%, 94%, 95%, 96%, 97%, 98%, 99%, or 100% sequence identity to the amino acid sequence SEQ ID NO: 440. In some embodiments, a VL sequence having at least 90%, 91%, 92%, 93%, 94%, 95%, 96%, 97%, 98%, or 99% identity contains substitutions (e.g., conservative substitutions), insertions, or deletions relative to the reference sequence, but an antibody or antigen-binding fragment thereof comprising that sequence retains the ability to bind to same antigen as the parent (e.g., cancer associated antigen). In some embodiments, a total of 1 to 10 amino acids have been substituted, inserted and/or deleted in the amino acid sequence SEQ ID NO: 440. In some embodiments, the substitutions, insertions, or deletions occur in regions outside the CDRs (e.g., in the FRs). Optionally, the antibody or antigen-binding fragment thereof comprises the VL sequence SEQ ID NO: 440, including one or more post-translational modifications of that sequence. In a particular embodiment, the VL comprises one, two or three CDRs selected from: a. CDR-L1, comprising the amino acid sequence SEQ ID NO: 982, b. CDR-L2, comprising the amino acid sequence SEQ ID NO: 1524, and c. CDR-L3, comprising the amino acid sequence SEQ ID NO: 2066.

[2186] In one aspect, an antibody or antigen-binding fragment thereof is provided, wherein the antibody or antigen-binding fragment thereof comprises a VH as in any of the embodiments provided above, and a VL as in any of the embodiments provided above. In some embodiments, the antibody or antigen-binding fragment thereof comprises the VH amino acid sequence of SEQ ID NO: 169, and the VL amino acid sequence of SEQ ID NO: 440, optionally including post-translational modifications of those sequences.

### TMEL1015

[2187] In one aspect, the present disclosure provides an antibody or antigen-binding fragment thereof comprising at least one or both variable regions selected from: a. VH comprising the amino acid sequence of SEQ ID NO: 170 and b. VL comprising the amino acid sequence of SEQ ID NO: 441.

[2188] In one aspect, the present disclosure provides an antibody or antigen-binding fragment thereof comprising at least one, two, three, four, five, or six CDRs selected from: a. CDR-H1 comprising the amino acid sequence of SEQ ID NO: 712, b. CDR-H2 comprising the amino acid sequence of SEQ ID NO: 1254, c. CDR-H3 comprising the amino acid sequence of SEQ ID NO: 1796, d. CDR-L1 comprising the amino acid sequence of SEQ ID NO: 983, e. CDR-L2 comprising the amino acid sequence of SEQ ID NO: 1525, and f. CDR-L3 comprising the amino acid sequence of SEQ ID NO: 2067.

[2189] In one aspect, the present disclosure provides an antibody or antigen-binding fragment thereof comprising a CDR-H3 comprising the amino acid sequence of SEQ ID NO: 1796, and a CDR-L3 comprising the amino acid sequence of SEQ ID NO: 2067.

[2190] In one aspect, the present disclosure provides an antibody or antigen-binding fragment thereof comprising at least one, at least two, or all three VH CDR sequences selected from: a. CDR-H1 comprising the amino acid sequence of SEQ ID NO: 712, b. CDR-H2 comprising the amino acid sequence of SEQ ID NO: 1254, c. CDR-H3 comprising the amino acid sequence of SEQ ID NO: 1796, and a VL comprising the amino acid sequence of SEQ ID NO: 441.

[2191] In one aspect, the present disclosure provides an antibody or antigen-binding fragment thereof comprising at least one, at least two, or all three VL CDR sequences selected from: a. CDR-L1 comprising the amino acid sequence of SEQ ID NO: 983, b. CDR-L2 comprising the amino acid sequence of SEQ ID NO: 1525, c. CDR-L3 comprising the amino acid sequence of SEQ ID NO: 2067, and a VH comprising the amino acid sequence of SEQ ID NO: 170.

[2192] In one aspect, an antibody or antigen-binding fragment thereof is provided, wherein the antibody or antigen-binding fragment thereof comprises a heavy chain variable domain (VH) having at least 90%, 91%, 92%, 93%, 94%, 95%, 96%, 97%, 98%, 99%, or 100% sequence identity to the amino acid sequence SEQ ID NO: 170. In some embodiments, a VH sequence having at least 90%, 91%, 92%, 93%, 94%, 95%, 96%, 97%, 98%, or 99% identity contains substitutions (e.g., conservative substitutions), insertions, or deletions relative to the reference sequence, but an antibody or antigen-binding fragment thereof comprising that sequence retains the ability to bind to same antigen as of the parent (e.g., cancer associated antigen). In some embodiments, a total of 1 to 10 amino acids have been substituted, inserted and/or deleted in the amino acid sequence SEQ ID NO: 170. In some embodiments, substitutions, insertions, or deletions occur in regions outside the CDRs (e.g., in the FRs). Optionally, the antibody or antigen-binding fragment thereof comprises the VH sequence SEQ ID NO: 170, including one or more post-translational modifications of that sequence. In a particular embodiment, the VH comprises one, two or three CDRs selected from: a. CDR-H1, comprising the amino acid sequence SEQ ID NO: 712, b. CDR-H2, comprising the amino acid sequence SEQ ID NO: 1254, and c. CDR-H3, comprising the amino acid sequence SEQ ID NO: 1796.

[2193] In one aspect, an antibody or antigen-binding fragment thereof is provided, wherein the antibody or antigen-binding fragment thereof comprises a light chain variable domain (VL) having at least 90%, 91%, 92%, 93%, 94%, 95%, 96%, 97%, 98%, 99%, or 100% sequence identity to the amino acid sequence SEQ ID NO: 441. In some embodiments, a VL sequence having at least 90%, 91%, 92%, 93%, 94%, 95%, 96%, 97%, 98%, or 99% identity contains substitutions (e.g., conservative substitutions), thereof comprising that sequence retains the ability to bind to same antigen as the parent (e.g., cancer associated antigen). In some embodiments, a total of 1 to 10 amino acids have been substituted, inserted and/or deleted in the amino acid sequence SEQ ID NO: 441. In some embodiments, the substitutions, insertions, or deletions occur in regions outside the CDRs (e.g., in the FRs). Optionally, the antibody or antigen-binding fragment thereof comprises the VL sequence SEQ ID NO: 441, including one or more post-translational modifications of that sequence. In a particular embodiment, the VL comprises one, two or three CDRs selected from: a. CDR-L1, comprising the amino acid sequence SEQ ID NO: 983, b. CDR-L2, comprising the amino acid sequence SEQ ID NO: 1525, and c. CDR-L3, comprising the amino acid sequence SEQ ID NO: 2067.

[2194] In one aspect, an antibody or antigen-binding fragment thereof is provided, wherein the antibody or antigen-binding fragment thereof comprises a VH as in any of the embodiments provided above, and a VL as in any of the embodiments provided above. In some embodiments, the antibody or antigen-binding fragment thereof comprises the VH amino acid sequence of SEQ ID NO: 170, and the VL amino acid sequence of SEQ ID NO: 441, optionally including post-translational modifications of those sequences.

### TMEL1016

[2195] In one aspect, the present disclosure provides an antibody or antigen-binding fragment thereof comprising at least one or both variable regions selected from: a. VH comprising the amino acid sequence of SEQ ID NO: 171 and b. VL comprising the amino acid sequence of SEQ ID NO: 442.

[2196] In one aspect, the present disclosure provides an antibody or antigen-binding fragment thereof comprising at least one, two, three, four, five, or six CDRs selected from: a. CDR-H1 comprising the amino acid sequence of SEQ ID NO: 713, b. CDR-H2 comprising the amino acid sequence of SEQ ID NO: 1255, c. CDR-H3 comprising the amino acid sequence of SEQ ID NO: 1797, d. CDR-L1 comprising the amino acid sequence of SEQ ID NO: 984, e. CDR-L2 comprising the amino acid sequence of SEQ ID NO: 1526, and f. CDR-L3 comprising the amino acid sequence of SEQ ID NO: 2068.

[2197] In one aspect, the present disclosure provides an antibody or antigen-binding fragment thereof comprising a CDR-H3 comprising the amino acid sequence of SEQ ID NO: 1797, and a CDR-L3 comprising the amino acid sequence of SEQ ID NO: 2068.

[2198] In one aspect, the present disclosure provides an antibody or antigen-binding fragment thereof comprising at least one, at least two, or all three VH CDR sequences selected from: a. CDR-H1 comprising the amino acid sequence of SEQ ID NO: 713, b. CDR-H2 comprising the amino acid sequence of SEQ ID NO: 1255, c. CDR-H3 comprising the amino acid sequence of SEQ ID NO: 1797, and a VL comprising the amino acid sequence of SEQ ID NO: 442.

[2199] In one aspect, the present disclosure provides an antibody or antigen-binding fragment thereof comprising at least one, at least two, or all three VL CDR sequences selected from: a. CDR-L1 comprising the amino acid sequence of SEQ ID NO: 984, b. CDR-L2 comprising the amino acid sequence of SEQ ID NO: 1526, c. CDR-L3 comprising the amino acid sequence of SEQ ID NO: 2068, and a VH comprising the amino acid sequence of SEQ ID NO: 171.

[2200] In one aspect, an antibody or antigen-binding fragment thereof is provided, wherein the antibody or antigen-binding fragment thereof comprises a heavy chain variable domain (VH) having at least 90%, 91%, 92%, 93%, 94%, 95%, 96%, 97%, 98%, 99%, or 100% sequence identity to the amino acid sequence SEQ ID NO: 171. In some embodiments, a VH sequence having at least 90%, 91%, 92%, 93%, 94%, 95%, 96%, 97%, 98%, or 99% identity contains substitutions (e.g., conservative substitutions), insertions, or deletions relative to the reference sequence, but an antibody or antigen-binding fragment thereof comprising that sequence retains the ability to bind to same antigen as of the parent (e.g., cancer associated antigen). In some embodiments, a total of 1 to 10 amino acids have been substituted, inserted and/or deleted in the amino acid sequence SEQ ID NO: 171. In some embodiments, substitutions, insertions, or deletions occur in regions outside the CDRs (e.g., in the FRs). Optionally, the antibody or antigen-binding fragment thereof comprises the VH sequence SEQ ID NO: 171, including one or more post-translational modifications of that sequence. In a particular embodiment, the VH comprises one, two or three CDRs selected from: a. CDR-H1, comprising the amino acid sequence SEQ ID NO: 713, b. CDR-H2, comprising the amino acid sequence SEQ ID NO: 1255, and c. CDR-H3, comprising the amino acid sequence SEQ ID NO: 1797.

[2201] In one aspect, an antibody or antigen-binding fragment thereof is provided, wherein the antibody or antigen-binding fragment thereof comprises a light chain variable domain (VL) having at least 90%, 91%, 92%, 93%, 94%, 95%, 96%, 97%, 98%, 99%, or 100% sequence identity to the amino acid sequence SEQ ID NO: 442. In some embodiments, a VL sequence having at least 90%, 91%, 92%, 93%, 94%, 95%, 96%, 97%, 98%, or 99% identity contains substitutions (e.g., conservative substitutions), insertions, or deletions relative to the reference sequence, but an antibody or antigen-binding fragment thereof comprising that sequence retains the ability to bind to same antigen as the parent (e.g., cancer associated antigen). In some embodiments, a total of 1 to 10 amino acids have been substituted, inserted and/or deleted in the amino acid sequence SEQ ID NO: 442. In some embodiments, the substitutions, insertions, or deletions occur in regions outside the CDRs (e.g., in the FRs). Optionally, the antibody or antigen-binding fragment thereof comprises the VL sequence SEQ ID NO: 442, including one or more post-translational modifications of that sequence. In a particular embodiment, the VL comprises one, two or three CDRs selected from: a. CDR-L1, comprising the amino acid sequence SEQ ID NO: 984, b. CDR-L2, comprising the amino acid sequence SEQ ID NO: 1526, and c. CDR-L3, comprising the amino acid sequence SEQ ID NO: 2068.

[2202] In one aspect, an antibody or antigen-binding fragment thereof is provided, wherein the antibody or antigen-binding fragment thereof comprises a VH as in any of the embodiments provided above, and a VL as in any of the embodiments provided above. In some embodiments, the antibody or antigen-binding fragment thereof comprises the VH amino acid sequence of SEQ ID NO: 171, and the VL amino acid sequence of SEQ ID NO: 442, optionally including post-translational modifications of those sequences.

### TMEL1017

[2203] In one aspect, the present disclosure provides an antibody or antigen-binding fragment thereof comprising at least one or both variable regions selected from: a. VH comprising the amino acid sequence of SEQ ID NO: 172 and b. VL comprising the amino acid sequence of SEQ ID NO: 443.

[2204] In one aspect, the present disclosure provides an antibody or antigen-binding fragment thereof comprising at least one, two, three, four, five, or six CDRs selected from: a. CDR-H1 comprising the amino acid sequence of SEQ ID NO: 714, b. CDR-H2 comprising the amino acid sequence of SEQ ID NO: 1256, c. CDR-H3 comprising the amino acid sequence of SEQ ID NO: 1798, d. CDR-L1 comprising the amino acid sequence of SEQ ID NO: 985, e. CDR-L2 comprising the amino acid sequence of SEQ ID NO: 1527, and f. CDR-L3 comprising the amino acid sequence of SEQ ID NO: 2069.

[2205] In one aspect, the present disclosure provides an antibody or antigen-binding fragment thereof comprising a CDR-H3 comprising the amino acid sequence of SEQ ID NO: 1798, and a CDR-L3 comprising the amino acid sequence of SEQ ID NO: 2069.

[2206] In one aspect, the present disclosure provides an antibody or antigen-binding fragment thereof comprising at least one, at least two, or all three VH CDR sequences selected from: a. CDR-H1 comprising the amino acid sequence of SEQ ID NO: 714, b. CDR-H2 comprising the amino acid sequence of SEQ ID NO: 1256, c. CDR-H3 comprising the amino acid sequence of SEQ ID NO: 1798, and a VL comprising the amino acid sequence of SEQ ID NO: 443.

[2207] In one aspect, the present disclosure provides an antibody or antigen-binding fragment thereof comprising at least one, at least two, or all three VL CDR sequences selected from: a. CDR-L1 comprising the amino acid sequence of SEQ ID NO: 985, b. CDR-L2 comprising the amino acid sequence of SEQ ID NO: 1527, c. CDR-L3 comprising the amino acid sequence of SEQ ID NO: 2069, and a VH comprising the amino acid sequence of SEQ ID NO: 172.

[2208] In one aspect, an antibody or antigen-binding fragment thereof is provided, wherein the antibody or antigen-binding fragment thereof comprises a heavy chain variable domain (VH) having at least 90%, 91%, 92%, 93%, 94%, 95%, 96%, 97%, 98%, 99%, or 100% sequence identity to the amino acid sequence SEQ ID NO: 172. In some embodiments, a VH sequence having at least 90%, 91%, 92%, 93%, 94%, 95%, 96%, 97%, 98%, or 99% identity contains substitutions (e.g., conservative substitutions), insertions, or deletions relative to the reference sequence, but an antibody or antigen-binding fragment thereof comprising that sequence retains the ability to bind to same antigen as of the parent (e.g., cancer associated antigen). In some embodiments, a total of 1 to 10 amino acids have been substituted, inserted and/or deleted in the amino acid sequence SEQ ID NO: 172. In some embodiments, substitutions, insertions, or deletions occur in regions outside the CDRs (e.g., in the FRs). Optionally, the antibody or antigen-binding fragment thereof comprises the VH sequence SEQ ID NO: 172, including one or more post-translational modifications of that sequence. In a particular embodiment, the VH comprises one, two or three CDRs selected from: a. CDR-H1, comprising the amino acid sequence SEQ ID NO: 714, b. CDR-H2, comprising the amino acid sequence SEQ ID NO: 1256, and c. CDR-H3, comprising the amino acid sequence SEQ ID NO: 1798.

[2209] In one aspect, an antibody or antigen-binding fragment thereof is provided, wherein the antibody or antigen-binding fragment thereof comprises a light chain variable domain (VL) having at least 90%, 91%, 92%, 93%, 94%, 95%, 96%, 97%, 98%, 99%, or 100% sequence identity to the amino acid sequence SEQ ID NO: 443. In some embodiments, a VL sequence having at least 90%, 91%, 92%, 93%, 94%, 95%, 96%, 97%, 98%, or 99% identity contains substitutions (e.g., conservative substitutions), insertions, or deletions relative to the reference sequence, but an antibody or antigen-binding fragment thereof comprising that sequence retains the ability to bind to same antigen as the parent (e.g., cancer associated antigen). In some embodiments, a total of 1 to 10 amino acids have been substituted, inserted and/or deleted in the amino acid sequence SEQ ID NO: 443. In some embodiments, the substitutions, insertions, or deletions occur in regions outside the CDRs (e.g., in the FRs). Optionally, the antibody or antigen-binding fragment thereof comprises the VL sequence SEQ ID NO: 443, including one or more post-translational modifications of that sequence. In a particular embodiment, the VL comprises one, two or three CDRs selected from: a. CDR-L1, comprising the amino acid sequence SEQ ID NO: 985, b. CDR-L2, comprising the amino acid sequence SEQ ID NO: 1527, and c. CDR-L3, comprising the amino acid sequence SEQ ID NO: 2069.

[2210] In one aspect, an antibody or antigen-binding fragment thereof is provided, wherein the antibody or antigen-binding fragment thereof comprises a VH as in any of the embodiments provided above, and a VL as in any of the embodiments provided above. In some embodiments, the antibody or antigen-binding fragment thereof comprises the VH amino acid sequence of SEQ ID NO: 172, and the VL amino acid sequence of SEQ ID NO: 443, optionally including post-translational modifications of those sequences.

### TMEL1018

[2211] In one aspect, the present disclosure provides an antibody or antigen-binding fragment thereof comprising at least one or both variable regions selected from: a. VH comprising the amino acid sequence of SEQ ID NO: 173 and b. VL comprising the amino acid sequence of SEQ ID NO: 444.

[2212] In one aspect, the present disclosure provides an antibody or antigen-binding fragment thereof comprising at least one, two, three, four, five, or six CDRs selected from: a. CDR-H1 comprising the amino acid sequence of SEQ ID NO: 715, b. CDR-H2 comprising the amino acid sequence of SEQ ID NO: 1257, c. CDR-H3 comprising the amino acid sequence of SEQ ID NO: 1799, d. CDR-L1 comprising the amino acid sequence of SEQ ID NO: 986, e. CDR-L2 comprising the amino acid sequence of SEQ ID NO: 1528, and f. CDR-L3 comprising the amino acid sequence of SEQ ID NO: 2070.

[2213] In one aspect, the present disclosure provides an antibody or antigen-binding fragment thereof comprising a CDR-H3 comprising the amino acid sequence of SEQ ID NO: 1799, and a CDR-L3 comprising the amino acid sequence of SEQ ID NO: 2070.

[2214] In one aspect, the present disclosure provides an antibody or antigen-binding fragment thereof comprising at least one, at least two, or all three VH CDR sequences selected from: a. CDR-H1 comprising the amino acid sequence of SEQ ID NO: 715, b. CDR-H2 comprising the amino acid sequence of SEQ ID NO: 1257, c. CDR-H3 comprising the amino acid sequence of SEQ ID NO: 1799, and a VL comprising the amino acid sequence of SEQ ID NO: 444.

[2215] In one aspect, the present disclosure provides an antibody or antigen-binding fragment thereof comprising at least one, at least two, or all three VL CDR sequences selected from: a. CDR-L1 comprising the amino acid sequence of SEQ ID NO: 986, b. CDR-L2 comprising the amino acid sequence of SEQ ID NO: 1528, c. CDR-L3 comprising the amino acid sequence of SEQ ID NO: 2070, and a VH comprising the amino acid sequence of SEQ ID NO: 173.

[2216] In one aspect, an antibody or antigen-binding fragment thereof is provided, wherein the antibody or antigen-binding fragment thereof comprises a heavy chain variable domain (VH) having at least 90%, 91%, 92%, 93%, 94%, 95%, 96%, 97%, 98%, 99%, or 100% sequence identity to the amino acid sequence SEQ ID NO: 173. In some embodiments, a VH sequence having at least 90%, 91%, 92%, 93%, 94%, 95%, 96%, 97%, 98%, or 99% identity contains substitutions (e.g., conservative substitutions), insertions, or deletions relative to the reference sequence, but an antibody or antigen-binding fragment thereof comprising that sequence retains the ability to bind to same antigen as of the parent (e.g., cancer associated antigen). In some embodiments, a total of 1 to 10 amino acids have been substituted, inserted and/or deleted in the amino acid sequence SEQ ID NO: 173. In some embodiments, substitutions, insertions, or deletions occur in regions outside the CDRs (e.g., in the FRs). Optionally, the antibody or antigen-binding fragment thereof comprises the VH sequence SEQ ID NO: 173, including one or more post-translational modifications of that sequence. In a particular embodiment, the VH comprises one, two or three CDRs selected from: a. CDR-H1, comprising the amino acid sequence SEQ ID NO: 715, b. CDR-H2, comprising the amino acid sequence SEQ ID NO: 1257, and c. CDR-H3, comprising the amino acid sequence SEQ ID NO: 1799.

[2217] In one aspect, an antibody or antigen-binding fragment thereof is provided, wherein the antibody or antigen-binding fragment thereof comprises a light chain variable domain (VL) having at least 90%, 91%, 92%, 93%, 94%, 95%, 96%, 97%, 98%, 99%, or 100% sequence identity to the amino acid sequence SEQ ID NO: 444. In some embodiments, a VL sequence having at least 90%, 91%, 92%, 93%, 94%, 95%, 96%, 97%, 98%, or 99% identity contains substitutions (e.g., conservative substitutions), insertions, or deletions relative to the reference sequence, but an antibody or antigen-binding fragment thereof comprising that sequence retains the ability to bind to same antigen as the parent (e.g., cancer associated antigen). In some embodiments, a total of 1 to 10 amino acids have been substituted, inserted and/or deleted in the amino acid sequence SEQ ID NO: 444. In some embodiments, the substitutions, insertions, or deletions occur in regions outside the CDRs (e.g., in the FRs). Optionally, the antibody or antigen-binding fragment thereof comprises the VL sequence SEQ ID NO: 444, including one or more post-translational modifications of that sequence. In a particular embodiment, the VL comprises one, two or three CDRs selected from: a. CDR-L1, comprising the amino acid sequence SEQ ID NO: 986, b. CDR-L2, comprising the amino acid sequence SEQ ID NO: 1528, and c. CDR-L3, comprising the amino acid sequence SEQ ID NO: 2070.

[2218] In one aspect, an antibody or antigen-binding fragment thereof is provided, wherein the antibody or antigen-binding fragment thereof comprises a VH as in any of the embodiments provided above, and a VL as in any of the embodiments provided above. In some embodiments, the antibody or antigen-binding fragment thereof comprises the VH amino acid sequence of SEQ ID NO: 173, and the VL amino acid sequence of SEQ ID NO: 444, optionally including post-translational modifications of those sequences.

### TMEL1019

[2219] In one aspect, the present disclosure provides an antibody or antigen-binding fragment thereof comprising at least one or both variable regions selected from: a. VH comprising the amino acid sequence of SEQ ID NO: 174 and b. VL comprising the amino acid sequence of SEQ ID NO: 445.

[2220] In one aspect, the present disclosure provides an antibody or antigen-binding fragment thereof comprising at least one, two, three, four, five, or six CDRs selected from: a. CDR-H1 comprising the amino acid sequence of SEQ ID NO: 716, b. CDR-H2 comprising the amino acid sequence of SEQ ID NO: 1258, c. CDR-H3 comprising the amino acid sequence of SEQ ID NO: 1800, d. CDR-L1 comprising the amino acid sequence of SEQ ID NO: 987, e. CDR-L2 comprising the amino acid sequence of SEQ ID NO: 1529, and f. CDR-L3 comprising the amino acid sequence of SEQ ID NO: 2071.

[2221] In one aspect, the present disclosure provides an antibody or antigen-binding fragment thereof comprising a CDR-H3 comprising the amino acid sequence of SEQ ID NO: 1800, and a CDR-L3 comprising the amino acid sequence of SEQ ID NO: 2071.

[2222] In one aspect, the present disclosure provides an antibody or antigen-binding fragment thereof comprising at least one, at least two, or all three VH CDR sequences selected from: a. CDR-H1 comprising the amino acid sequence of SEQ ID NO: 716, b. CDR-H2 comprising the amino acid sequence of SEQ ID NO: 1258, c. CDR-H3 comprising the amino acid sequence of SEQ ID NO: 1800, and a VL comprising the amino acid sequence of SEQ ID NO: 445.

[2223] In one aspect, the present disclosure provides an antibody or antigen-binding fragment thereof comprising at least one, at least two, or all three VL CDR sequences selected from: a. CDR-L1 comprising the amino acid sequence of SEQ ID NO: 987, b. CDR-L2 comprising the amino acid sequence of SEQ ID NO: 1529, c. CDR-L3 comprising the amino acid sequence of SEQ ID NO: 2071, and a VH comprising the amino acid sequence of SEQ ID NO: 174.

[2224] In one aspect, an antibody or antigen-binding fragment thereof is provided, wherein the antibody or antigen-binding fragment thereof comprises a heavy chain variable domain (VH) having at least 90%, 91%, 92%, 93%, 94%, 95%, 96%, 97%, 98%, 99%, or 100% sequence identity to the amino acid sequence SEQ ID NO: 174. In some embodiments, a VH sequence having at least 90%, 91%, 92%, 93%, 94%, 95%, 96%, 97%, 98%, or 99% identity contains substitutions (e.g., conservative substitutions), insertions, or deletions relative to the reference sequence, but an antibody or antigen-binding fragment thereof comprising that sequence retains the ability to bind to same antigen as of the parent (e.g., cancer associated antigen). In some embodiments, a total of 1 to 10 amino acids have been substituted, inserted and/or deleted in the amino acid sequence SEQ ID NO: 174. In some embodiments, substitutions, insertions, or deletions occur in regions outside the CDRs (e.g., in the FRs). Optionally, the antibody or antigen-binding fragment thereof comprises the VH sequence SEQ ID NO: 174, including one or more post-translational modifications of that sequence. In a particular embodiment, the VH comprises one, two or three CDRs selected from: a. CDR-H1, comprising the amino acid sequence SEQ ID NO: 716, b. CDR-H2, comprising the amino acid sequence SEQ ID NO: 1258, and c. CDR-H3, comprising the amino acid sequence SEQ ID NO: 1800.

[2225] In one aspect, an antibody or antigen-binding fragment thereof is provided, wherein the antibody or antigen-binding fragment thereof comprises a light chain variable domain (VL) having at least 90%, 91%, 92%, 93%, 94%, 95%, 96%, 97%, 98%, 99%, or 100% sequence identity to the amino acid sequence SEQ ID NO: 445. In some embodiments, a VL sequence having at least 90%, 91%, 92%, 93%, 94%, 95%, 96%, 97%, 98%, or 99% identity contains substitutions (e.g., conservative substitutions), insertions, or deletions relative to the reference sequence, but an antibody or antigen-binding fragment thereof comprising that sequence retains the ability to bind to same antigen as the parent (e.g., cancer associated antigen). In some embodiments, a total of 1 to 10 amino acids have been substituted, inserted and/or deleted in the amino acid sequence SEQ ID NO: 445. In some embodiments, the substitutions, insertions, or deletions occur in regions outside the CDRs (e.g., in the FRs). Optionally, the antibody or antigen-binding fragment thereof comprises the VL sequence SEQ ID NO: 445, including one or more post-translational modifications of that sequence. In a particular embodiment, the VL comprises one, two or three CDRs selected from: a. CDR-L1, comprising the amino acid sequence SEQ ID NO: 987, b. CDR-L2, comprising the amino acid sequence SEQ ID NO: 1529, and c. CDR-L3, comprising the amino acid sequence SEQ ID NO: 2071.

[2226] In one aspect, an antibody or antigen-binding fragment thereof is provided, wherein the antibody or antigen-binding fragment thereof comprises a VH as in any of the embodiments provided above, and a VL as in any of the embodiments provided above. In some embodiments, the antibody or antigen-binding fragment thereof comprises the VH amino acid sequence of SEQ ID NO: 174, and the VL amino acid sequence of SEQ ID NO: 445, optionally including post-translational modifications of those sequences.

### TMEL1020

[2227] In one aspect, the present disclosure provides an antibody or antigen-binding fragment thereof comprising at least one or both variable regions selected from: a. VH comprising the amino acid sequence of SEQ ID NO: 175 and b. VL comprising the amino acid sequence of SEQ ID NO: 446.

[2228] In one aspect, the present disclosure provides an antibody or antigen-binding fragment thereof comprising at least one, two, three, four, five, or six CDRs selected from: a. CDR-H1 comprising the amino acid sequence of SEQ ID NO: 717, b. CDR-H2 comprising the amino acid sequence of SEQ ID NO: 1259, c. CDR-H3 comprising the amino acid sequence of SEQ ID NO: 1801, d. CDR-L1 comprising the amino acid sequence of SEQ ID NO: 988, e. CDR-L2 comprising the amino acid sequence of SEQ ID NO: 1530, and f. CDR-L3 comprising the amino acid sequence of SEQ ID NO: 2072.

[2229] In one aspect, the present disclosure provides an antibody or antigen-binding fragment thereof comprising a CDR-H3 comprising the amino acid sequence of SEQ ID NO: 1801, and a CDR-L3 comprising the amino acid sequence of SEQ ID NO: 2072.

[2230] In one aspect, the present disclosure provides an antibody or antigen-binding fragment thereof comprising at least one, at least two, or all three VH CDR sequences selected from: a. CDR-H1 comprising the amino acid sequence of SEQ ID NO: 717, b. CDR-H2 comprising the amino acid sequence of SEQ ID NO: 1259, c. CDR-H3 comprising the amino acid sequence of SEQ ID NO: 1801, and a VL comprising the amino acid sequence of SEQ ID NO: 446.

[2231] In one aspect, the present disclosure provides an antibody or antigen-binding fragment thereof comprising at least one, at least two, or all three VL CDR sequences selected from: a. CDR-L1 comprising the amino acid sequence of SEQ ID NO: 988, b. CDR-L2 comprising the amino acid sequence of SEQ ID NO: 1530, c. CDR-L3 comprising the amino acid sequence of SEQ ID NO: 2072, and a VH comprising the amino acid sequence of SEQ ID NO: 175.

[2232] In one aspect, an antibody or antigen-binding fragment thereof is provided, wherein the antibody or antigen-binding fragment thereof comprises a heavy chain variable domain (VH) having at least 90%, 91%, 92%, 93%, 94%, 95%, 96%, 97%, 98%, 99%, or 100% sequence identity to the amino acid sequence SEQ ID NO: 175. In some embodiments, a VH sequence having at least 90%, 91%, 92%, 93%, 94%, 95%, 96%, 97%, 98%, or 99% identity contains substitutions (e.g., conservative substitutions), insertions, or deletions relative to the reference sequence, but an antibody or antigen-binding fragment thereof comprising that sequence retains the ability to bind to same antigen as of the parent (e.g., cancer associated antigen). In some embodiments, a total of 1 to 10 amino acids have been substituted, inserted and/or deleted in the amino acid sequence SEQ ID NO: 175. In some embodiments, substitutions, insertions, or deletions occur in regions outside the CDRs (e.g., in the FRs). Optionally, the antibody or antigen-binding fragment thereof comprises the VH sequence SEQ ID NO: 175, including one or more post-translational modifications of that sequence. In a particular embodiment, the VH comprises one, two or three CDRs selected from: a. CDR-H1, comprising the amino acid sequence SEQ ID NO: 717, b. CDR-H2, comprising the amino acid sequence SEQ ID NO: 1259, and c. CDR-H3, comprising the amino acid sequence SEQ ID NO: 1801.

[2233] In one aspect, an antibody or antigen-binding fragment thereof is provided, wherein the antibody or antigen-binding fragment thereof comprises a light chain variable domain (VL) having at least 90%, 91%, 92%, 93%, 94%, 95%, 96%, 97%, 98%, 99%, or 100% sequence identity to the amino acid sequence SEQ ID NO: 446. In some embodiments, a VL sequence having at least 90%, 91%, 92%, 93%, 94%, 95%, 96%, 97%, 98%, or 99% identity contains substitutions (e.g., conservative substitutions), insertions, or deletions relative to the reference sequence, but an antibody or antigen-binding fragment thereof comprising that sequence retains the ability to bind to same antigen as the parent (e.g., cancer associated antigen). In some embodiments, a total of 1 to 10 amino acids have been substituted, inserted and/or deleted in the amino acid sequence SEQ ID NO: 446. In some embodiments, the substitutions, insertions, or deletions occur in regions outside the CDRs (e.g., in the FRs). Optionally, the antibody or antigen-binding fragment thereof comprises the VL sequence SEQ ID NO: 446, including one or more post-translational modifications of that sequence. In a particular embodiment, the VL comprises one, two or three CDRs selected from: a. CDR-L1, comprising the amino acid sequence SEQ ID NO: 988, b. CDR-L2, comprising the amino acid sequence SEQ ID NO: 1530, and c. CDR-L3, comprising the amino acid sequence SEQ ID NO: 2072.

[2234] In one aspect, an antibody or antigen-binding fragment thereof is provided, wherein the antibody or antigen-binding fragment thereof comprises a VH as in any of the embodiments provided above, and a VL as in any of the embodiments provided above. In some embodiments, the antibody or antigen-binding fragment thereof comprises the VH amino acid sequence of SEQ ID NO: 175, and the VL amino acid sequence of SEQ ID NO: 446, optionally including post-translational modifications of those sequences.

### TMEL1021

[2235] In one aspect, the present disclosure provides an antibody or antigen-binding fragment thereof comprising at least one or both variable regions selected from: a. VH comprising the amino acid sequence of SEQ ID NO: 176 and b. VL comprising the amino acid sequence of SEQ ID NO: 447.

[2236] In one aspect, the present disclosure provides an antibody or antigen-binding fragment thereof comprising at least one, two, three, four, five, or six CDRs selected from: a. CDR-H1 comprising the amino acid sequence of SEQ ID NO: 718, b. CDR-H2 comprising the amino acid sequence of SEQ ID NO: 1260, c. CDR-H3 comprising the amino acid sequence of SEQ ID NO: 1802, d. CDR-L1 comprising the amino acid sequence of SEQ ID NO: 989, e. CDR-L2 comprising the amino acid sequence of SEQ ID NO: 1531, and f. CDR-L3 comprising the amino acid sequence of SEQ ID NO: 2073.

[2237] In one aspect, the present disclosure provides an antibody or antigen-binding fragment thereof comprising a CDR-H3 comprising the amino acid sequence of SEQ ID NO: 1802, and a CDR-L3 comprising the amino acid sequence of SEQ ID NO: 2073.

[2238] In one aspect, the present disclosure provides an antibody or antigen-binding fragment thereof comprising at least one, at least two, or all three VH CDR sequences selected from: a. CDR-H1 comprising the amino acid sequence of SEQ ID NO: 718, b. CDR-H2 comprising the amino acid sequence of SEQ ID NO: 1260, c. CDR-H3 comprising the amino acid sequence of SEQ ID NO: 1802, and a VL comprising the amino acid sequence of SEQ ID NO: 447.

[2239] In one aspect, the present disclosure provides an antibody or antigen-binding fragment thereof comprising at least one, at least two, or all three VL CDR sequences selected from: a. CDR-L1 comprising the amino acid sequence of SEQ ID NO: 989, b. CDR-L2 comprising the amino acid sequence of SEQ ID NO: 1531, c. CDR-L3 comprising the amino acid sequence of SEQ ID NO: 2073, and a VH comprising the amino acid sequence of SEQ ID NO: 176.

[2240] In one aspect, an antibody or antigen-binding fragment thereof is provided, wherein the antibody or antigen-binding fragment thereof comprises a heavy chain variable domain (VH) having at least 90%, 91%, 92%, 93%, 94%, 95%, 96%, 97%, 98%, 99%, or 100% sequence identity to the amino acid sequence SEQ ID NO: 176. In some embodiments, a VH sequence having at least 90%, 91%, 92%, 93%, 94%, 95%, 96%, 97%, 98%, or 99% identity contains substitutions (e.g., conservative substitutions), insertions, or deletions relative to the reference sequence, but an antibody or antigen-binding fragment thereof comprising that sequence retains the ability to bind to same antigen as of the parent (e.g., cancer associated antigen). In some embodiments, a total of 1 to 10 amino acids have been substituted, inserted and/or deleted in the amino acid sequence SEQ ID NO: 176. In some embodiments, substitutions, antigen-binding fragment thereof comprises the VH sequence SEQ ID NO: 176, including one or more post-translational modifications of that sequence. In a particular embodiment, the VH comprises one, two or three CDRs selected from: a. CDR-H1, comprising the amino acid sequence SEQ ID NO: 718, b. CDR-H2, comprising the amino acid sequence SEQ ID NO: 1260, and c. CDR-H3, comprising the amino acid sequence SEQ ID NO: 1802.

[2241] In one aspect, an antibody or antigen-binding fragment thereof is provided, wherein the antibody or antigen-binding fragment thereof comprises a light chain variable domain (VL) having at least 90%, 91%, 92%, 93%, 94%, 95%, 96%, 97%, 98%, 99%, or 100% sequence identity to the amino acid sequence SEQ ID NO: 447. In some embodiments, a VL sequence having at least 90%, 91%, 92%, 93%, 94%, 95%, 96%, 97%, 98%, or 99% identity contains substitutions (e.g., conservative substitutions), insertions, or deletions relative to the reference sequence, but an antibody or antigen-binding fragment thereof comprising that sequence retains the ability to bind to same antigen as the parent (e.g., cancer associated antigen). In some embodiments, a total of 1 to 10 amino acids have been substituted, inserted and/or deleted in the amino acid sequence SEQ ID NO: 447. In some embodiments, the substitutions, insertions, or deletions occur in regions outside the CDRs (e.g., in the FRs). Optionally, the antibody or antigen-binding fragment thereof comprises the VL sequence SEQ ID NO: 447, including one or more post-translational modifications of that sequence. In a particular embodiment, the VL comprises one, two or three CDRs selected from: a. CDR-L1, comprising the amino acid sequence SEQ ID NO: 989, b. CDR-L2, comprising the amino acid sequence SEQ ID NO: 1531, and c. CDR-L3, comprising the amino acid sequence SEQ ID NO: 2073.

[2242] In one aspect, an antibody or antigen-binding fragment thereof is provided, wherein the antibody or antigen-binding fragment thereof comprises a VH as in any of the embodiments provided above, and a VL as in any of the embodiments provided above. In some embodiments, the antibody or antigen-binding fragment thereof comprises the VH amino acid sequence of SEQ ID NO: 176, and the VL amino acid sequence of SEQ ID NO: 447, optionally including post-translational modifications of those sequences.

### TMEL1022

[2243] In one aspect, the present disclosure provides an antibody or antigen-binding fragment thereof comprising at least one or both variable regions selected from: a. VH comprising the amino acid sequence of SEQ ID NO: 177 and b. VL comprising the amino acid sequence of SEQ ID NO: 448.

[2244] In one aspect, the present disclosure provides an antibody or antigen-binding fragment thereof comprising at least one, two, three, four, five, or six CDRs selected from: a. CDR-H1 comprising the amino acid sequence of SEQ ID NO: 719, b. CDR-H2 comprising the amino acid sequence of SEQ ID NO: 1261, c. CDR-H3 comprising the amino acid sequence of SEQ ID NO: 1803, d. CDR-L1 comprising the amino acid sequence of SEQ ID NO: 990, e. CDR-L2 comprising the amino acid sequence of SEQ ID NO: 1532, and f. CDR-L3 comprising the amino acid sequence of SEQ ID NO: 2074.

[2245] In one aspect, the present disclosure provides an antibody or antigen-binding fragment thereof comprising a CDR-H3 comprising the amino acid sequence of SEQ ID NO: 1803, and a CDR-L3 comprising the amino acid sequence of SEQ ID NO: 2074.

[2246] In one aspect, the present disclosure provides an antibody or antigen-binding fragment thereof comprising at least one, at least two, or all three VH CDR sequences selected from: a. CDR-H1 comprising the amino acid sequence of SEQ ID NO: 719, b. CDR-H2 comprising the amino acid sequence of SEQ ID NO: 1261, c. CDR-H3 comprising the amino acid sequence of SEQ ID NO: 1803, and a VL comprising the amino acid sequence of SEQ ID NO: 448.

[2247] In one aspect, the present disclosure provides an antibody or antigen-binding fragment thereof comprising at least one, at least two, or all three VL CDR sequences selected from: a. CDR-L1 comprising the amino acid sequence of SEQ ID NO: 990, b. CDR-L2 comprising the amino acid sequence of SEQ ID NO: 1532, c. CDR-L3 comprising the amino acid sequence of SEQ ID NO: 2074, and a VH comprising the amino acid sequence of SEQ ID NO: 177.

[2248] In one aspect, an antibody or antigen-binding fragment thereof is provided, wherein the antibody or antigen-binding fragment thereof comprises a heavy chain variable domain (VH) having at least 90%, 91%, 92%, 93%, 94%, 95%, 96%, 97%, 98%, 99%, or 100% sequence identity to the amino acid sequence SEQ ID NO: 177. In some embodiments, a VH sequence having at least 90%, 91%, 92%, 93%, 94%, 95%, 96%, 97%, 98%, or 99% identity contains substitutions (e.g., conservative substitutions), insertions, or deletions relative to the reference sequence, but an antibody or antigen-binding fragment thereof comprising that sequence retains the ability to bind to same antigen as of the parent (e.g., cancer associated antigen). In some embodiments, a total of 1 to 10 amino acids have been substituted, inserted and/or deleted in the amino acid sequence SEQ ID NO: 177. In some embodiments, substitutions, insertions, or deletions occur in regions outside the CDRs (e.g., in the FRs). Optionally, the antibody or antigen-binding fragment thereof comprises the VH sequence SEQ ID NO: 177, including one or more post-translational modifications of that sequence. In a particular embodiment, the VH comprises one, two or three CDRs selected from: a. CDR-H1, comprising the amino acid sequence SEQ ID NO: 719, b. CDR-H2, comprising the amino acid sequence SEQ ID NO: 1261, and c. CDR-H3, comprising the amino acid sequence SEQ ID NO: 1803.

[2249] In one aspect, an antibody or antigen-binding fragment thereof is provided, wherein the antibody or antigen-binding fragment thereof comprises a light chain variable domain (VL) having at least 90%, 91%, 92%, 93%, 94%, 95%, 96%, 97%, 98%, 99%, or 100% sequence identity to the amino acid sequence SEQ ID NO: 448. In some embodiments, a VL sequence having at least 90%, 91%, 92%, 93%, 94%, 95%, 96%, 97%, 98%, or 99% identity contains substitutions (e.g., conservative substitutions), insertions, or deletions relative to the reference sequence, but an antibody or antigen-binding fragment thereof comprising that sequence retains the ability to bind to same antigen as the parent (e.g., cancer associated antigen). In some embodiments, a total of 1 to 10 amino acids have been substituted, inserted and/or deleted in the amino acid sequence SEQ ID NO: 448. In some embodiments, the substitutions, insertions, or deletions occur in regions outside the CDRs (e.g., in the FRs). Optionally, the antibody or antigen-binding fragment thereof comprises the VL sequence SEQ ID NO: 448, including one or more post-translational modifications of that sequence. In a particular embodiment, the VL comprises one, two or three CDRs selected from: a. CDR-L1, comprising the amino acid sequence SEQ ID NO: 990, b. CDR-L2, comprising the amino acid sequence SEQ ID NO: 1532, and c. CDR-L3, comprising the amino acid sequence SEQ ID NO: 2074.

[2250] In one aspect, an antibody or antigen-binding fragment thereof is provided, wherein the antibody or antigen-binding fragment thereof comprises a VH as in any of the embodiments provided above, and a VL as in any of the embodiments provided above. In some embodiments, the antibody or antigen-binding fragment thereof comprises the VH amino acid sequence of SEQ ID NO: 177, and the VL amino acid sequence of SEQ ID NO: 448, optionally including post-translational modifications of those sequences.

### TMEL1023

[2251] In one aspect, the present disclosure provides an antibody or antigen-binding fragment thereof comprising at least one or both variable regions selected from: a. VH comprising the amino acid sequence of SEQ ID NO: 178 and b. VL comprising the amino acid sequence of SEQ ID NO: 449.

[2252] In one aspect, the present disclosure provides an antibody or antigen-binding fragment thereof comprising at least one, two, three, four, five, or six CDRs selected from: a. CDR-H1 comprising the amino acid sequence of SEQ ID NO: 720, b CDR-H2 comprising the amino acid sequence of SEQ ID NO: 1262, c. CDR-H3 comprising the amino acid sequence of SEQ ID NO: 1804, d. CDR-L1 comprising the amino acid sequence of SEQ ID NO: 991, e. CDR-L2 comprising the amino acid sequence of SEQ ID NO: 1533, and f. CDR-L3 comprising the amino acid sequence of SEQ ID NO: 2075.

[2253] In one aspect, the present disclosure provides an antibody or antigen-binding fragment thereof comprising a CDR-H3 comprising the amino acid sequence of SEQ ID NO: 1804, and a CDR-L3 comprising the amino acid sequence of SEQ ID NO: 2075.

[2254] In one aspect, the present disclosure provides an antibody or antigen-binding fragment thereof comprising at least one, at least two, or all three VH CDR sequences selected from: a. CDR-H1 comprising the amino acid sequence of SEQ ID NO: 720, b. CDR-H2 comprising the amino acid sequence of SEQ ID NO: 1262, c. CDR-H3 comprising the amino acid sequence of SEQ ID NO: 1804, and a VL comprising the amino acid sequence of SEQ ID NO: 449.

[2255] In one aspect, the present disclosure provides an antibody or antigen-binding fragment thereof comprising at least one, at least two, or all three VL CDR sequences selected from: a. CDR-L1 comprising the amino acid sequence of SEQ ID NO: 991, b. CDR-L2 comprising the amino acid sequence of SEQ ID NO: 1533, c. CDR-L3 comprising the amino acid sequence of SEQ ID NO: 2075, and a VH comprising the amino acid sequence of SEQ ID NO: 178.

[2256] In one aspect, an antibody or antigen-binding fragment thereof is provided, wherein the antibody or antigen-binding fragment thereof comprises a heavy chain variable domain (VH) having at least 90%, 91%, 92%, 93%, 94%, 95%, 96%, 97%, 98%, 99%, or 100% sequence identity to the amino acid sequence SEQ ID NO: 178. In some embodiments, a VH sequence having at least 90%, 91%, 92%, 93%, 94%, 95%, 96%, 97%, 98%, or 99% identity contains substitutions (e.g., conservative substitutions), insertions, or deletions relative to the reference sequence, but an antibody or antigen-binding fragment thereof comprising that sequence retains the ability to bind to same antigen as of the parent (e.g., cancer associated antigen). In some embodiments, a total of 1 to 10 amino acids have been substituted, inserted and/or deleted in the amino acid sequence SEQ ID NO: 178. In some embodiments, substitutions, insertions, or deletions occur in regions outside the CDRs (e.g., in the FRs). Optionally, the antibody or antigen-binding fragment thereof comprises the VH sequence SEQ ID NO: 178, including one or more post-translational modifications of that sequence. In a particular embodiment, the VH comprises one, two or three CDRs selected from: a. CDR-H1, comprising the amino acid sequence SEQ ID NO: 720, b. CDR-H2, comprising the amino acid sequence SEQ ID NO: 1262, and c. CDR-H3, comprising the amino acid sequence SEQ ID NO: 1804.

[2257] In one aspect, an antibody or antigen-binding fragment thereof is provided, wherein the antibody or antigen-binding fragment thereof comprises a light chain variable domain (VL) having at least 90%, 91%, 92%, 93%, 94%, 95%, 96%, 97%, 98%, 99%, or 100% sequence identity to the amino acid sequence SEQ ID NO: 449. In some embodiments, a VL sequence having at least 90%, 91%, 92%, 93%, 94%, 95%, 96%, 97%, 98%, or 99% identity contains substitutions (e.g., conservative substitutions), insertions, or deletions relative to the reference sequence, but an antibody or antigen-binding fragment thereof comprising that sequence retains the ability to bind to same antigen as the parent (e.g., cancer associated antigen). In some embodiments, a total of 1 to 10 amino acids have been substituted, inserted and/or deleted in the amino acid sequence SEQ ID NO: 449. In some embodiments, the substitutions, insertions, or deletions occur in regions outside the CDRs (e.g., in the FRs). Optionally, the antibody or antigen-binding fragment thereof comprises the VL sequence SEQ ID NO: 449, including one or more post-translational modifications of that sequence. In a particular embodiment, the VL comprises one, two or three CDRs selected from: a. CDR-L1, comprising the amino acid sequence SEQ ID NO: 991, b. CDR-L2, comprising the amino acid sequence SEQ ID NO: 1533, and c. CDR-L3, comprising the amino acid sequence SEQ ID NO: 2075.

[2258] In one aspect, an antibody or antigen-binding fragment thereof is provided, wherein the antibody or antigen-binding fragment thereof comprises a VH as in any of the embodiments provided above, and a VL as in any of the embodiments provided above. In some embodiments, the antibody or antigen-binding fragment thereof comprises the VH amino acid sequence of SEQ ID NO: 178, and the VL amino acid sequence of SEQ ID NO: 449, optionally including post-translational modifications of those sequences.

### TMEL1024

[2259] In one aspect, the present disclosure provides an antibody or antigen-binding fragment thereof comprising at least one or both variable regions selected from: a. VH comprising the amino acid sequence of SEQ ID NO: 179 and b. VL comprising the amino acid sequence of SEQ ID NO: 450.

[2260] In one aspect, the present disclosure provides an antibody or antigen-binding fragment thereof comprising at least one, two, three, four, five, or six CDRs selected from: a. CDR-H1 comprising the amino acid sequence of SEQ ID NO: 721, b. CDR-H2 comprising the amino acid sequence of SEQ ID NO: 1263, c. CDR-H3 comprising the amino acid sequence of SEQ ID NO: 1805, d. CDR-L1 comprising the amino acid sequence of SEQ ID NO: 992, e. CDR-L2 comprising the amino acid sequence of SEQ ID NO: 1534, and f. CDR-L3 comprising the amino acid sequence of SEQ ID NO: 2076.

[2261] In one aspect, the present disclosure provides an antibody or antigen-binding fragment thereof comprising a CDR-H3 comprising the amino acid sequence of SEQ ID NO: 1805, and a CDR-L3 comprising the amino acid sequence of SEQ ID NO: 2076.

[2262] In one aspect, the present disclosure provides an antibody or antigen-binding fragment thereof comprising at least one, at least two, or all three VH CDR sequences selected from: a. CDR-H1 comprising the amino acid sequence of SEQ ID NO: 721, b. CDR-H2 comprising the amino acid sequence of SEQ ID NO: 1263, c. CDR-H3 comprising the amino acid sequence of SEQ ID NO: 1805, and a VL comprising the amino acid sequence of SEQ ID NO: 450.

[2263] In one aspect, the present disclosure provides an antibody or antigen-binding fragment thereof comprising at least one, at least two, or all three VL CDR sequences selected from: a. CDR-L1 comprising the amino acid sequence of SEQ ID NO: 992, b. CDR-L2 comprising the amino acid sequence of SEQ ID NO: 1534, c. CDR-L3 comprising the amino acid sequence of SEQ ID NO: 2076, and a VH comprising the amino acid sequence of SEQ ID NO: 179.

[2264] In one aspect, an antibody or antigen-binding fragment thereof is provided, wherein the antibody or antigen-binding fragment thereof comprises a heavy chain variable domain (VH) having at least 90%, 91%, 92%, 93%, 94%, 95%, 96%, 97%, 98%, 99%, or 100% sequence identity to the amino acid sequence SEQ ID NO: 179. In some embodiments, a VH sequence having at least 90%, 91%, 92%, 93%, 94%, 95%, 96%, 97%, 98%, or 99% identity contains substitutions (e.g., conservative substitutions), insertions, or deletions relative to the reference sequence, but an antibody or antigen-binding fragment thereof comprising that sequence retains the ability to bind to same antigen as of the parent (e.g., cancer associated antigen). In some embodiments, a total of 1 to 10 amino acids have been substituted, inserted and/or deleted in the amino acid sequence SEQ ID NO: 179. In some embodiments, substitutions, insertions, or deletions occur in regions outside the CDRs (e.g., in the FRs). Optionally, the antibody or antigen-binding fragment thereof comprises the VH sequence SEQ ID NO: 179, including one or more post-translational modifications of that sequence. In a particular embodiment, the VH comprises one, two or three CDRs selected from: a. CDR-H1, comprising the amino acid sequence SEQ ID NO: 721, b. CDR-H2, comprising the amino acid sequence SEQ ID NO: 1263, and c. CDR-H3, comprising the amino acid sequence SEQ ID NO: 1805.

[2265] In one aspect, an antibody or antigen-binding fragment thereof is provided, wherein the antibody or antigen-binding fragment thereof comprises a light chain variable domain (VL) having at least 90%, 91%, 92%, 93%, 94%, 95%, 96%, 97%, 98%, 99%, or 100% sequence identity to the amino acid sequence SEQ ID NO: 450. In some embodiments, a VL sequence having at least 90%, 91%, 92%, 93%, 94%, 95%, 96%, 97%, 98%, or 99% identity contains substitutions (e.g., conservative substitutions), insertions, or deletions relative to the reference sequence, but an antibody or antigen-binding fragment thereof comprising that sequence retains the ability to bind to same antigen as the parent (e.g., cancer associated antigen). In some embodiments, a total of 1 to 10 amino acids have been substituted, inserted and/or deleted in the amino acid sequence SEQ ID NO: 450. In some embodiments, the substitutions, antigen-binding fragment thereof comprises the VL sequence SEQ ID NO: 450, including one or more post-translational modifications of that sequence. In a particular embodiment, the VL comprises one, two or three CDRs selected from: a. CDR-L1, comprising the amino acid sequence SEQ ID NO: 992, b. CDR-L2, comprising the amino acid sequence SEQ ID NO: 1534, and c. CDR-L3, comprising the amino acid sequence SEQ ID NO: 2076.

[2266] In one aspect, an antibody or antigen-binding fragment thereof is provided, wherein the antibody or antigen-binding fragment thereof comprises a VH as in any of the embodiments provided above, and a VL as in any of the embodiments provided above. In some embodiments, the antibody or antigen-binding fragment thereof comprises the VH amino acid sequence of SEQ ID NO: 179, and the VL amino acid sequence of SEQ ID NO: 450, optionally including post-translational modifications of those sequences.

### TMEL1025

[2267] In one aspect, the present disclosure provides an antibody or antigen-binding fragment thereof comprising at least one or both variable regions selected from: a. VH comprising the amino acid sequence of SEQ ID NO: 180 and b. VL comprising the amino acid sequence of SEQ ID NO: 451.

[2268] In one aspect, the present disclosure provides an antibody or antigen-binding fragment thereof comprising at least one, two, three, four, five, or six CDRs selected from: a. CDR-H1 comprising the amino acid sequence of SEQ ID NO: 722, b. CDR-H2 comprising the amino acid sequence of SEQ ID NO: 1264, c. CDR-H3 comprising the amino acid sequence of SEQ ID NO: 1806, d. CDR-L1 comprising the amino acid sequence of SEQ ID NO: 993, e. CDR-L2 comprising the amino acid sequence of SEQ ID NO: 1535, and f. CDR-L3 comprising the amino acid sequence of SEQ ID NO: 2077.

[2269] In one aspect, the present disclosure provides an antibody or antigen-binding fragment thereof comprising a CDR-H3 comprising the amino acid sequence of SEQ ID NO: 1806, and a CDR-L3 comprising the amino acid sequence of SEQ ID NO: 2077.

[2270] In one aspect, the present disclosure provides an antibody or antigen-binding fragment thereof comprising at least one, at least two, or all three VH CDR sequences selected from: a. CDR-H1 comprising the amino acid sequence of SEQ ID NO: 722, b. CDR-H2 comprising the amino acid sequence of SEQ ID NO: 1264, c. CDR-H3 comprising the amino acid sequence of SEQ ID NO: 1806, and a VL comprising the amino acid sequence of SEQ ID NO: 451.

[2271] In one aspect, the present disclosure provides an antibody or antigen-binding fragment thereof comprising at least one, at least two, or all three VL CDR sequences selected from: a. CDR-L1 comprising the amino acid sequence of SEQ ID NO: 993, b. CDR-L2 comprising the amino acid sequence of SEQ ID NO: 1535, c. CDR-L3 comprising the amino acid sequence of SEQ ID NO: 2077, and a VH comprising the amino acid sequence of SEQ ID NO: 180.

[2272] In one aspect, an antibody or antigen-binding fragment thereof is provided, wherein the antibody or antigen-binding fragment thereof comprises a heavy chain variable domain (VH) having at least 90%, 91%, 92%, 93%, 94%, 95%, 96%, 97%, 98%, 99%, or 100% sequence identity to the amino acid sequence SEQ ID NO: 180. In some embodiments, a VH sequence having at least 90%, 91%, 92%, 93%, 94%, 95%, 96%, 97%, 98%, or 99% identity contains substitutions (e.g., conservative substitutions), thereof comprising that sequence retains the ability to bind to same antigen as of the parent (e.g., cancer associated antigen). In some embodiments, a total of 1 to 10 amino acids have been substituted, inserted and/or deleted in the amino acid sequence SEQ ID NO: 180. In some embodiments, substitutions, insertions, or deletions occur in regions outside the CDRs (e.g., in the FRs). Optionally, the antibody or antigen-binding fragment thereof comprises the VH sequence SEQ ID NO: 180, including one or more post-translational modifications of that sequence. In a particular embodiment, the VH comprises one, two or three CDRs selected from: a. CDR-H1, comprising the amino acid sequence SEQ ID NO: 722, b. CDR-H2, comprising the amino acid sequence SEQ ID NO: 1264, and c. CDR-H3, comprising the amino acid sequence SEQ ID NO: 1806.

[2273] In one aspect, an antibody or antigen-binding fragment thereof is provided, wherein the antibody or antigen-binding fragment thereof comprises a light chain variable domain (VL) having at least 90%, 91%, 92%, 93%, 94%, 95%, 96%, 97%, 98%, 99%, or 100% sequence identity to the amino acid sequence SEQ ID NO: 451. In some embodiments, a VL sequence having at least 90%, 91%, 92%, 93%, 94%, 95%, 96%, 97%, 98%, or 99% identity contains substitutions (e.g., conservative substitutions), insertions, or deletions relative to the reference sequence, but an antibody or antigen-binding fragment thereof comprising that sequence retains the ability to bind to same antigen as the parent (e.g., cancer associated antigen). In some embodiments, a total of 1 to 10 amino acids have been substituted, inserted and/or deleted in the amino acid sequence SEQ ID NO: 451. In some embodiments, the substitutions, insertions, or deletions occur in regions outside the CDRs (e.g., in the FRs). Optionally, the antibody or antigen-binding fragment thereof comprises the VL sequence SEQ ID NO: 451, including one or more post-translational modifications of that sequence. In a particular embodiment, the VL comprises one, two or three CDRs selected from: a. CDR-L1, comprising the amino acid sequence SEQ ID NO: 993, b. CDR-L2, comprising the amino acid sequence SEQ ID NO: 1535, and c. CDR-L3, comprising the amino acid sequence SEQ ID NO: 2077.

[2274] In one aspect, an antibody or antigen-binding fragment thereof is provided, wherein the antibody or antigen-binding fragment thereof comprises a VH as in any of the embodiments provided above, and a VL as in any of the embodiments provided above. In some embodiments, the antibody or antigen-binding fragment thereof comprises the VH amino acid sequence of SEQ ID NO: 180, and the VL amino acid sequence of SEQ ID NO: 451, optionally including post-translational modifications of those sequences.

### TMEL1026

[2275] In one aspect, the present disclosure provides an antibody or antigen-binding fragment thereof comprising at least one or both variable regions selected from: a. VH comprising the amino acid sequence of SEQ ID NO: 181 and b. VL comprising the amino acid sequence of SEQ ID NO: 452.

[2276] In one aspect, the present disclosure provides an antibody or antigen-binding fragment thereof comprising at least one, two, three, four, five, or six CDRs selected from: a. CDR-H1 comprising the amino acid sequence of SEQ ID NO: 723, b. CDR-H2 comprising the amino acid sequence of SEQ ID NO: 1265, c. CDR-H3 comprising the amino acid sequence of SEQ ID NO: 1807, d. CDR-L1 comprising the amino acid sequence of SEQ ID NO: 994, e. CDR-L2 comprising the amino acid sequence of SEQ ID NO: 1536, and f. CDR-L3 comprising the amino acid sequence of SEQ ID NO: 2078.

[2277] In one aspect, the present disclosure provides an antibody or antigen-binding fragment thereof comprising a CDR-H3 comprising the amino acid sequence of SEQ ID NO: 1807, and a CDR-L3 comprising the amino acid sequence of SEQ ID NO: 2078.

[2278] In one aspect, the present disclosure provides an antibody or antigen-binding fragment thereof comprising at least one, at least two, or all three VH CDR sequences selected from: a. CDR-H1 comprising the amino acid sequence of SEQ ID NO: 723, b. CDR-H2 comprising the amino acid sequence of SEQ ID NO: 1265, c CDR-H3 comprising the amino acid sequence of SEQ ID NO: 1807, and a VL comprising the amino acid sequence of SEQ ID NO: 452.

[2279] In one aspect, the present disclosure provides an antibody or antigen-binding fragment thereof comprising at least one, at least two, or all three VL CDR sequences selected from: a. CDR-L1 comprising the amino acid sequence of SEQ ID NO: 994, b. CDR-L2 comprising the amino acid sequence of SEQ ID NO: 1536, c. CDR-L3 comprising the amino acid sequence of SEQ ID NO: 2078, and a VH comprising the amino acid sequence of SEQ ID NO: 181.

[2280] In one aspect, an antibody or antigen-binding fragment thereof is provided, wherein the antibody or antigen-binding fragment thereof comprises a heavy chain variable domain (VH) having at least 90%, 91%, 92%, 93%, 94%, 95%, 96%, 97%, 98%, 99%, or 100% sequence identity to the amino acid sequence SEQ ID NO: 181. In some embodiments, a VH sequence having at least 90%, 91%, 92%, 93%, 94%, 95%, 96%, 97%, 98%, or 99% identity contains substitutions (e.g., conservative substitutions), insertions, or deletions relative to the reference sequence, but an antibody or antigen-binding fragment thereof comprising that sequence retains the ability to bind to same antigen as of the parent (e.g., cancer associated antigen). In some embodiments, a total of 1 to 10 amino acids have been substituted, inserted and/or deleted in the amino acid sequence SEQ ID NO: 181. In some embodiments, substitutions, insertions, or deletions occur in regions outside the CDRs (e.g., in the FRs). Optionally, the antibody or antigen-binding fragment thereof comprises the VH sequence SEQ ID NO: 181, including one or more post-translational modifications of that sequence. In a particular embodiment, the VH comprises one, two or three CDRs selected from: a. CDR-H1, comprising the amino acid sequence SEQ ID NO: 723, b. CDR-H2, comprising the amino acid sequence SEQ ID NO: 1265, and c. CDR-H3, comprising the amino acid sequence SEQ ID NO: 1807.

[2281] In one aspect, an antibody or antigen-binding fragment thereof is provided, wherein the antibody or antigen-binding fragment thereof comprises a light chain variable domain (VL) having at least 90%, 91%, 92%, 93%, 94%, 95%, 96%, 97%, 98%, 99%, or 100% sequence identity to the amino acid sequence SEQ ID NO: 452. In some embodiments, a VL sequence having at least 90%, 91%, 92%, 93%, 94%, 95%, 96%, 97%, 98%, or 99% identity contains substitutions (e.g., conservative substitutions), insertions, or deletions relative to the reference sequence, but an antibody or antigen-binding fragment thereof comprising that sequence retains the ability to bind to same antigen as the parent (e.g., cancer associated antigen). In some embodiments, a total of 1 to 10 amino acids have been substituted, inserted and/or deleted in the amino acid sequence SEQ ID NO: 452. In some embodiments, the substitutions, insertions, or deletions occur in regions outside the CDRs (e.g., in the FRs). Optionally, the antibody or antigen-binding fragment thereof comprises the VL sequence SEQ ID NO: 452, including one or more post-translational modifications of that sequence. In a particular embodiment, the VL comprises one, two or three CDRs selected from: a. CDR-L1, comprising the amino acid sequence SEQ ID NO: 994, b. CDR-L2, comprising the amino acid sequence SEQ ID NO: 1536, and CDR-L3, comprising the amino acid sequence SEQ ID NO: 2078.

[2282] In one aspect, an antibody or antigen-binding fragment thereof is provided, wherein the antibody or antigen-binding fragment thereof comprises a VH as in any of the embodiments provided above, and a VL as in any of the embodiments provided above. In some embodiments, the antibody or antigen-binding fragment thereof comprises the VH amino acid sequence of SEQ ID NO: 181, and the VL amino acid sequence of SEQ ID NO: 452, optionally including post-translational modifications of those sequences.

### TMEL1027

[2283] In one aspect, the present disclosure provides an antibody or antigen-binding fragment thereof comprising at least one or both variable regions selected from: a. VH comprising the amino acid sequence of SEQ ID NO: 182 and b. VL comprising the amino acid sequence of SEQ ID NO: 453.

[2284] In one aspect, the present disclosure provides an antibody or antigen-binding fragment thereof comprising at least one, two, three, four, five, or six CDRs selected from: a. CDR-H1 comprising the amino acid sequence of SEQ ID NO: 724, b. CDR-H2 comprising the amino acid sequence of SEQ ID NO: 1266, c. CDR-H3 comprising the amino acid sequence of SEQ ID NO: 1808, d. CDR-L1 comprising the amino acid sequence of SEQ ID NO: 995, e. CDR-L2 comprising the amino acid sequence of SEQ ID NO: 1537, and f. CDR-L3 comprising the amino acid sequence of SEQ ID NO: 2079.

[2285] In one aspect, the present disclosure provides an antibody or antigen-binding fragment thereof comprising a CDR-H3 comprising the amino acid sequence of SEQ ID NO: 1808, and a CDR-L3 comprising the amino acid sequence of SEQ ID NO: 2079.

[2286] In one aspect, the present disclosure provides an antibody or antigen-binding fragment thereof comprising at least one, at least two, or all three VH CDR sequences selected from: a. CDR-H1 comprising the amino acid sequence of SEQ ID NO: 724, b. CDR-H2 comprising the amino acid sequence of SEQ ID NO: 1266, c. CDR-H3 comprising the amino acid sequence of SEQ ID NO: 1808, and a VL comprising the amino acid sequence of SEQ ID NO: 453.

[2287] In one aspect, the present disclosure provides an antibody or antigen-binding fragment thereof comprising at least one, at least two, or all three VL CDR sequences selected from: a. CDR-L1 comprising the amino acid sequence of SEQ ID NO: 995, b. CDR-L2 comprising the amino acid sequence of SEQ ID NO: 1537, c. CDR-L3 comprising the amino acid sequence of SEQ ID NO: 2079, and a VH comprising the amino acid sequence of SEQ ID NO: 182.

[2288] In one aspect, an antibody or antigen-binding fragment thereof is provided, wherein the antibody or antigen-binding fragment thereof comprises a heavy chain variable domain (VH) having at least 90%, 91%, 92%, 93%, 94%, 95%, 96%, 97%, 98%, 99%, or 100% sequence identity to the amino acid sequence SEQ ID NO: 182. In some embodiments, a VH sequence having at least 90%, 91%, 92%, 93%, 94%, 95%, 96%, 97%, 98%, or 99% identity contains substitutions (e.g., conservative substitutions), insertions, or deletions relative to the reference sequence, but an antibody or antigen-binding fragment thereof comprising that sequence retains the ability to bind to same antigen as of the parent (e.g., cancer associated antigen). In some embodiments, a total of 1 to 10 amino acids have been substituted, inserted and/or deleted in the amino acid sequence SEQ ID NO: 182. In some embodiments, substitutions, insertions, or deletions occur in regions outside the CDRs (e.g., in the FRs). Optionally, the antibody or antigen-binding fragment thereof comprises the VH sequence SEQ ID NO: 182, including one or more post-translational modifications of that sequence. In a particular embodiment, the VH comprises one, two or three CDRs selected from: a. CDR-H1, comprising the amino acid sequence SEQ ID NO: 724, b. CDR-H2, comprising the amino acid sequence SEQ ID NO: 1266, and c. CDR-H3, comprising the amino acid sequence SEQ ID NO: 1808.

[2289] In one aspect, an antibody or antigen-binding fragment thereof is provided, wherein the antibody or antigen-binding fragment thereof comprises a light chain variable domain (VL) having at least 90%, 91%, 92%, 93%, 94%, 95%, 96%, 97%, 98%, 99%, or 100% sequence identity to the amino acid sequence SEQ ID NO: 453. In some embodiments, a VL sequence having at least 90%, 91%, 92%, 93%, 94%, 95%, 96%, 97%, 98%, or 99% identity contains substitutions (e.g., conservative substitutions), insertions, or deletions relative to the reference sequence, but an antibody or antigen-binding fragment thereof comprising that sequence retains the ability to bind to same antigen as the parent (e.g., cancer associated antigen). In some embodiments, a total of 1 to 10 amino acids have been substituted, inserted and/or deleted in the amino acid sequence SEQ ID NO: 453. In some embodiments, the substitutions, insertions, or deletions occur in regions outside the CDRs (e.g., in the FRs). Optionally, the antibody or antigen-binding fragment thereof comprises the VL sequence SEQ ID NO: 453, including one or more post-translational modifications of that sequence. In a particular embodiment, the VL comprises one, two or three CDRs selected from: a. CDR-L1, comprising the amino acid sequence SEQ ID NO: 995, b. CDR-L2, comprising the amino acid sequence SEQ ID NO: 1537, and c. CDR-L3, comprising the amino acid sequence SEQ ID NO: 2079.

[2290] In one aspect, an antibody or antigen-binding fragment thereof is provided, wherein the antibody or antigen-binding fragment thereof comprises a VH as in any of the embodiments provided above, and a VL as in any of the embodiments provided above. In some embodiments, the antibody or antigen-binding fragment thereof comprises the VH amino acid sequence of SEQ ID NO: 182, and the VL amino acid sequence of SEQ ID NO: 453, optionally including post-translational modifications of those sequences.

### TMEL1028

[2291] In one aspect, the present disclosure provides an antibody or antigen-binding fragment thereof comprising at least one or both variable regions selected from: a. VH comprising the amino acid sequence of SEQ ID NO: 183 and b. VL comprising the amino acid sequence of SEQ ID NO: 454.

[2292] In one aspect, the present disclosure provides an antibody or antigen-binding fragment thereof comprising at least one, two, three, four, five, or six CDRs selected from: a. CDR-H1 comprising the amino acid sequence of SEQ ID NO: 725, b. CDR-H2 comprising the amino acid sequence of SEQ ID NO: 1267, c. CDR-H3 comprising the amino acid sequence of SEQ ID NO: 1809, d. CDR-L1 comprising the amino acid sequence of SEQ ID NO: 996, e. CDR-L2 comprising the amino acid sequence of SEQ ID NO: 1538, and f. CDR-L3 comprising the amino acid sequence of SEQ ID NO: 2080.

[2293] In one aspect, the present disclosure provides an antibody or antigen-binding fragment thereof comprising a CDR-H3 comprising the amino acid sequence of SEQ ID NO: 1809, and a CDR-L3 comprising the amino acid sequence of SEQ ID NO: 2080.

[2294] In one aspect, the present disclosure provides an antibody or antigen-binding fragment thereof comprising at least one, at least two, or all three VH CDR sequences selected from: a. CDR-H1 comprising the amino acid sequence of SEQ ID NO: 725, b. CDR-H2 comprising the amino acid sequence of SEQ ID NO: 1267, c. CDR-H3 comprising the amino acid sequence of SEQ ID NO: 1809, and a VL comprising the amino acid sequence of SEQ ID NO: 454.

[2295] In one aspect, the present disclosure provides an antibody or antigen-binding fragment thereof comprising at least one, at least two, or all three VL CDR sequences selected from: a. CDR-L1 comprising the amino acid sequence of SEQ ID NO: 996, b. CDR-L2 comprising the amino acid sequence of SEQ ID NO: 1538, c. CDR-L3 comprising the amino acid sequence of SEQ ID NO: 2080, and a VH comprising the amino acid sequence of SEQ ID NO: 183.

[2296] In one aspect, an antibody or antigen-binding fragment thereof is provided, wherein the antibody or antigen-binding fragment thereof comprises a heavy chain variable domain (VH) having at least 90%, 91%, 92%, 93%, 94%, 95%, 96%, 97%, 98%, 99%, or 100% sequence identity to the amino acid sequence SEQ ID NO: 183. In some embodiments, a VH sequence having at least 90%, 91%, 92%, 93%, 94%, 95%, 96%, 97%, 98%, or 99% identity contains substitutions (e.g., conservative substitutions), insertions, or deletions relative to the reference sequence, but an antibody or antigen-binding fragment thereof comprising that sequence retains the ability to bind to same antigen as of the parent (e.g., cancer associated antigen). In some embodiments, a total of 1 to 10 amino acids have been substituted, inserted and/or deleted in the amino acid sequence SEQ ID NO: 183. In some embodiments, substitutions, insertions, or deletions occur in regions outside the CDRs (e.g., in the FRs). Optionally, the antibody or antigen-binding fragment thereof comprises the VH sequence SEQ ID NO: 183, including one or more post-translational modifications of that sequence. In a particular embodiment, the VH comprises one, two or three CDRs selected from: a. CDR-H1, comprising the amino acid sequence SEQ ID NO: 725, b. CDR-H2, comprising the amino acid sequence SEQ ID NO: 1267, and c. CDR-H3, comprising the amino acid sequence SEQ ID NO: 1809.

[2297] In one aspect, an antibody or antigen-binding fragment thereof is provided, wherein the antibody or antigen-binding fragment thereof comprises a light chain variable domain (VL) having at least 90%, 91%, 92%, 93%, 94%, 95%, 96%, 97%, 98%, 99%, or 100% sequence identity to the amino acid sequence SEQ ID NO: 454. In some embodiments, a VL sequence having at least 90%, 91%, 92%, 93%, 94%, 95%, 96%, 97%, 98%, or 99% identity contains substitutions (e.g., conservative substitutions), thereof comprising that sequence retains the ability to bind to same antigen as the parent (e.g., cancer associated antigen). In some embodiments, a total of 1 to 10 amino acids have been substituted, inserted and/or deleted in the amino acid sequence SEQ ID NO: 454. In some embodiments, the substitutions, insertions, or deletions occur in regions outside the CDRs (e.g., in the FRs). Optionally, the antibody or antigen-binding fragment thereof comprises the VL sequence SEQ ID NO: 454, including one or more post-translational modifications of that sequence. In a particular embodiment, the VL comprises one, two or three CDRs selected from: a. CDR-L1, comprising the amino acid sequence SEQ ID NO: 996, b. CDR-L2, comprising the amino acid sequence SEQ ID NO: 1538, and c. CDR-L3, comprising the amino acid sequence SEQ ID NO: 2080.

[2298] In one aspect, an antibody or antigen-binding fragment thereof is provided, wherein the antibody or antigen-binding fragment thereof comprises a VH as in any of the embodiments provided above, and a VL as in any of the embodiments provided above. In some embodiments, the antibody or antigen-binding fragment thereof comprises the VH amino acid sequence of SEQ ID NO: 183, and the VL amino acid sequence of SEQ ID NO: 454, optionally including post-translational modifications of those sequences.

### TMEL1029

[2299] In one aspect, the present disclosure provides an antibody or antigen-binding fragment thereof comprising at least one or both variable regions selected from: a. VH comprising the amino acid sequence of SEQ ID NO: 184 and b. VL comprising the amino acid sequence of SEQ ID NO: 455.

[2300] In one aspect, the present disclosure provides an antibody or antigen-binding fragment thereof comprising at least one, two, three, four, five, or six CDRs selected from: a. CDR-H1 comprising the amino acid sequence of SEQ ID NO: 726, b. CDR-H2 comprising the amino acid sequence of SEQ ID NO: 1268, c. CDR-H3 comprising the amino acid sequence of SEQ ID NO: 1810, d. CDR-L1 comprising the amino acid sequence of SEQ ID NO: 997, e. CDR-L2 comprising the amino acid sequence of SEQ ID NO: 1539, and f. CDR-L3 comprising the amino acid sequence of SEQ ID NO: 2081.

[2301] In one aspect, the present disclosure provides an antibody or antigen-binding fragment thereof comprising a CDR-H3 comprising the amino acid sequence of SEQ ID NO: 1810, and a CDR-L3 comprising the amino acid sequence of SEQ ID NO: 2081.

[2302] In one aspect, the present disclosure provides an antibody or antigen-binding fragment thereof comprising at least one, at least two, or all three VH CDR sequences selected from: a. CDR-H1 comprising the amino acid sequence of SEQ ID NO: 726, b. CDR-H2 comprising the amino acid sequence of SEQ ID NO: 1268, c. CDR-H3 comprising the amino acid sequence of SEQ ID NO: 1810, and a VL comprising the amino acid sequence of SEQ ID NO: 455.

[2303] In one aspect, the present disclosure provides an antibody or antigen-binding fragment thereof comprising at least one, at least two, or all three VL CDR sequences selected from: a. CDR-L1 comprising the amino acid sequence of SEQ ID NO: 997, b. CDR-L2 comprising the amino acid sequence of SEQ ID NO: 1539, c. CDR-L3 comprising the amino acid sequence of SEQ ID NO: 2081, and a VH comprising the amino acid sequence of SEQ ID NO: 184.

[2304] In one aspect, an antibody or antigen-binding fragment thereof is provided, wherein the antibody or antigen-binding fragment thereof comprises a heavy chain variable domain (VH) having at least 90%, 91%, 92%, 93%, 94%, 95%, 96%, 97%, 98%, 99%, or 100% sequence identity to the amino acid sequence SEQ ID NO: 184. In some embodiments, a VH sequence having at least 90%, 91%, 92%, 93%, 94%, 95%, 96%, 97%, 98%, or 99% identity contains substitutions (e.g., conservative substitutions), insertions, or deletions relative to the reference sequence, but an antibody or antigen-binding fragment thereof comprising that sequence retains the ability to bind to same antigen as of the parent (e.g., cancer associated antigen). In some embodiments, a total of 1 to 10 amino acids have been substituted, inserted and/or deleted in the amino acid sequence SEQ ID NO: 184. In some embodiments, substitutions, insertions, or deletions occur in regions outside the CDRs (e.g., in the FRs). Optionally, the antibody or antigen-binding fragment thereof comprises the VH sequence SEQ ID NO: 184, including one or more post-translational modifications of that sequence. In a particular embodiment, the VH comprises one, two or three CDRs selected from: a. CDR-H1, comprising the amino acid sequence SEQ ID NO: 726, b. CDR-H2, comprising the amino acid sequence SEQ ID NO: 1268, and c. CDR-H3, comprising the amino acid sequence SEQ ID NO: 1810.

[2305] In one aspect, an antibody or antigen-binding fragment thereof is provided, wherein the antibody or antigen-binding fragment thereof comprises a light chain variable domain (VL) having at least 90%, 91%, 92%, 93%, 94%, 95%, 96%, 97%, 98%, 99%, or 100% sequence identity to the amino acid sequence SEQ ID NO: 455. In some embodiments, a VL sequence having at least 90%, 91%, 92%, 93%, 94%, 95%, 96%, 97%, 98%, or 99% identity contains substitutions (e.g., conservative substitutions), insertions, or deletions relative to the reference sequence, but an antibody or antigen-binding fragment thereof comprising that sequence retains the ability to bind to same antigen as the parent (e.g., cancer associated antigen). In some embodiments, a total of 1 to 10 amino acids have been substituted, inserted and/or deleted in the amino acid sequence SEQ ID NO: 455. In some embodiments, the substitutions, insertions, or deletions occur in regions outside the CDRs (e.g., in the FRs). Optionally, the antibody or antigen-binding fragment thereof comprises the VL sequence SEQ ID NO: 455, including one or more post-translational modifications of that sequence. In a particular embodiment, the VL comprises one, two or three CDRs selected from: a. CDR-L1, comprising the amino acid sequence SEQ ID NO: 997, b. CDR-L2, comprising the amino acid sequence SEQ ID NO: 1539, and c. CDR-L3, comprising the amino acid sequence SEQ ID NO: 2081.

[2306] In one aspect, an antibody or antigen-binding fragment thereof is provided, wherein the antibody or antigen-binding fragment thereof comprises a VH as in any of the embodiments provided above, and a VL as in any of the embodiments provided above. In some embodiments, the antibody or antigen-binding fragment thereof comprises the VH amino acid sequence of SEQ ID NO: 184, and the VL amino acid sequence of SEQ ID NO: 455, optionally including post-translational modifications of those sequences.

### TMEL1030

[2307] In one aspect, the present disclosure provides an antibody or antigen-binding fragment thereof comprising at least one or both variable regions selected from: a. VH comprising the amino acid sequence of SEQ ID NO: 185 and b. VL comprising the amino acid sequence of SEQ ID NO: 456.

[2308] In one aspect, the present disclosure provides an antibody or antigen-binding fragment thereof comprising at least one, two, three, four, five, or six CDRs selected from: a. CDR-H1 comprising the amino acid sequence of SEQ ID NO: 727, b. CDR-H2 comprising the amino acid sequence of SEQ ID NO: 1269, c. CDR-H3 comprising the amino acid sequence of SEQ ID NO: 1811, d. CDR-L1 comprising the amino acid sequence of SEQ ID NO: 998, e. CDR-L2 comprising the amino acid sequence of SEQ ID NO: 1540, and f. CDR-L3 comprising the amino acid sequence of SEQ ID NO: 2082.

[2309] In one aspect, the present disclosure provides an antibody or antigen-binding fragment thereof comprising a CDR-H3 comprising the amino acid sequence of SEQ ID NO: 1811, and a CDR-L3 comprising the amino acid sequence of SEQ ID NO: 2082.

[2310] In one aspect, the present disclosure provides an antibody or antigen-binding fragment thereof comprising at least one, at least two, or all three VH CDR sequences selected from: a. CDR-H1 comprising the amino acid sequence of SEQ ID NO: 727, b. CDR-H2 comprising the amino acid sequence of SEQ ID NO: 1269, c. CDR-H3 comprising the amino acid sequence of SEQ ID NO: 1811, and a VL comprising the amino acid sequence of SEQ ID NO: 456.

[2311] In one aspect, the present disclosure provides an antibody or antigen-binding fragment thereof comprising at least one, at least two, or all three VL CDR sequences selected from: a. CDR-L1 comprising the amino acid sequence of SEQ ID NO: 998, b. CDR-L2 comprising the amino acid sequence of SEQ ID NO: 1540, c. CDR-L3 comprising the amino acid sequence of SEQ ID NO: 2082, and a VH comprising the amino acid sequence of SEQ ID NO: 185.

[2312] In one aspect, an antibody or antigen-binding fragment thereof is provided, wherein the antibody or antigen-binding fragment thereof comprises a heavy chain variable domain (VH) having at least 90%, 91%, 92%, 93%, 94%, 95%, 96%, 97%, 98%, 99%, or 100% sequence identity to the amino acid sequence SEQ ID NO: 185. In some embodiments, a VH sequence having at least 90%, 91%, 92%, 93%, 94%, 95%, 96%, 97%, 98%, or 99% identity contains substitutions (e.g., conservative substitutions), insertions, or deletions relative to the reference sequence, but an antibody or antigen-binding fragment thereof comprising that sequence retains the ability to bind to same antigen as of the parent (e.g., cancer associated antigen). In some embodiments, a total of 1 to 10 amino acids have been substituted, inserted and/or deleted in the amino acid sequence SEQ ID NO: 185. In some embodiments, substitutions, insertions, or deletions occur in regions outside the CDRs (e.g., in the FRs). Optionally, the antibody or antigen-binding fragment thereof comprises the VH sequence SEQ ID NO: 185, including one or more post-translational modifications of that sequence. In a particular embodiment, the VH comprises one, two or three CDRs selected from: a. CDR-H1, comprising the amino acid sequence SEQ ID NO: 727, b. CDR-H2, comprising the amino acid sequence SEQ ID NO: 1269, and c. CDR-H3, comprising the amino acid sequence SEQ ID NO: 1811.

[2313] In one aspect, an antibody or antigen-binding fragment thereof is provided, wherein the antibody or antigen-binding fragment thereof comprises a light chain variable domain (VL) having at least 90%, 91%, 92%, 93%, 94%, 95%, 96%, 97%, 98%, 99%, or 100% sequence identity to the amino acid sequence SEQ ID NO: 456. In some embodiments, a VL sequence having at least 90%, 91%, 92%, 93%, 94%, 95%, 96%, 97%, 98%, or 99% identity contains substitutions (e.g., conservative substitutions), insertions, or deletions relative to the reference sequence, but an antibody or antigen-binding fragment thereof comprising that sequence retains the ability to bind to same antigen as the parent (e.g., cancer associated antigen). In some embodiments, a total of 1 to 10 amino acids have been substituted, inserted and/or deleted in the amino acid sequence SEQ ID NO: 456. In some embodiments, the substitutions, insertions, or deletions occur in regions outside the CDRs (e.g., in the FRs). Optionally, the antibody or antigen-binding fragment thereof comprises the VL sequence SEQ ID NO: 456, including one or more post-translational modifications of that sequence. In a particular embodiment, the VL comprises one, two or three CDRs selected from: a. CDR-L1, comprising the amino acid sequence SEQ ID NO: 998, b. CDR-L2, comprising the amino acid sequence SEQ ID NO: 1540, and c. CDR-L3, comprising the amino acid sequence SEQ ID NO: 2082.

[2314] In one aspect, an antibody or antigen-binding fragment thereof is provided, wherein the antibody or antigen-binding fragment thereof comprises a VH as in any of the embodiments provided above, and a VL as in any of the embodiments provided above. In some embodiments, the antibody or antigen-binding fragment thereof comprises the VH amino acid sequence of SEQ ID NO: 185, and the VL amino acid sequence of SEQ ID NO: 456, optionally including post-translational modifications of those sequences.

### TMEL1031

[2315] In one aspect, the present disclosure provides an antibody or antigen-binding fragment thereof comprising at least one or both variable regions selected from: a. VH comprising the amino acid sequence of SEQ ID NO: 186 and b. VL comprising the amino acid sequence of SEQ ID NO: 457.

[2316] In one aspect, the present disclosure provides an antibody or antigen-binding fragment thereof comprising at least one, two, three, four, five, or six CDRs selected from: a. CDR-H1 comprising the amino acid sequence of SEQ ID NO: 728, b. CDR-H2 comprising the amino acid sequence of SEQ ID NO: 1270, c. CDR-H3 comprising the amino acid sequence of SEQ ID NO: 1812, d. CDR-L1 comprising the amino acid sequence of SEQ ID NO: 999, e. CDR-L2 comprising the amino acid sequence of SEQ ID NO: 1541, and f. CDR-L3 comprising the amino acid sequence of SEQ ID NO: 2083.

[2317] In one aspect, the present disclosure provides an antibody or antigen-binding fragment thereof comprising a CDR-H3 comprising the amino acid sequence of SEQ ID NO: 1812, and a CDR-L3 comprising the amino acid sequence of SEQ ID NO: 2083.

[2318] In one aspect, the present disclosure provides an antibody or antigen-binding fragment thereof comprising at least one, at least two, or all three VH CDR sequences selected from: a. CDR-H1 comprising the amino acid sequence of SEQ ID NO: 728, b. CDR-H2 comprising the amino acid sequence of SEQ ID NO: 1270, c. CDR-H3 comprising the amino acid sequence of SEQ ID NO: 1812, and a VL comprising the amino acid sequence of SEQ ID NO: 457.

[2319] In one aspect, the present disclosure provides an antibody or antigen-binding fragment thereof comprising at least one, at least two, or all three VL CDR sequences selected from: a. CDR-L1 comprising the amino acid sequence of SEQ ID NO: 999, b. CDR-L2 comprising the amino acid sequence of SEQ ID NO: 1541, c. CDR-L3 comprising the amino acid sequence of SEQ ID NO: 2083, and a VH comprising the amino acid sequence of SEQ ID NO: 186.

[2320] In one aspect, an antibody or antigen-binding fragment thereof is provided, wherein the antibody or antigen-binding fragment thereof comprises a heavy chain variable domain (VH) having at least 90%, 91%, 92%, 93%, 94%, 95%, 96%, 97%, 98%, 99%, or 100% sequence identity to the amino acid sequence SEQ ID NO: 186. In some embodiments, a VH sequence having at least 90%, 91%, 92%, 93%, 94%, 95%, 96%, 97%, 98%, or 99% identity contains substitutions (e.g., conservative substitutions), insertions, or deletions relative to the reference sequence, but an antibody or antigen-binding fragment thereof comprising that sequence retains the ability to bind to same antigen as of the parent (e.g., cancer associated antigen). In some embodiments, a total of 1 to 10 amino acids have been substituted, inserted and/or deleted in the amino acid sequence SEQ ID NO: 186. In some embodiments, substitutions, insertions, or deletions occur in regions outside the CDRs (e.g., in the FRs). Optionally, the antibody or antigen-binding fragment thereof comprises the VH sequence SEQ ID NO: 186, including one or more post-translational modifications of that sequence. In a particular embodiment, the VH comprises one, two or three CDRs selected from: a. CDR-H1, comprising the amino acid sequence SEQ ID NO: 728, b. CDR-H2, comprising the amino acid sequence SEQ ID NO: 1270, and c. CDR-H3, comprising the amino acid sequence SEQ ID NO: 1812.

[2321] In one aspect, an antibody or antigen-binding fragment thereof is provided, wherein the antibody or antigen-binding fragment thereof comprises a light chain variable domain (VL) having at least 90%, 91%, 92%, 93%, 94%, 95%, 96%, 97%, 98%, 99%, or 100% sequence identity to the amino acid sequence SEQ ID NO: 457. In some embodiments, a VL sequence having at least 90%, 91%, 92%, 93%, 94%, 95%, 96%, 97%, 98%, or 99% identity contains substitutions (e.g., conservative substitutions), insertions, or deletions relative to the reference sequence, but an antibody or antigen-binding fragment thereof comprising that sequence retains the ability to bind to same antigen as the parent (e.g., cancer associated antigen). In some embodiments, a total of 1 to 10 amino acids have been substituted, inserted and/or deleted in the amino acid sequence SEQ ID NO: 457. In some embodiments, the substitutions, insertions, or deletions occur in regions outside the CDRs (e.g., in the FRs). Optionally, the antibody or antigen-binding fragment thereof comprises the VL sequence SEQ ID NO: 457, including one or more post-translational modifications of that sequence. In a particular embodiment, the VL comprises one, two or three CDRs selected from: a. CDR-L1, comprising the amino acid sequence SEQ ID NO: 999, b. CDR-L2, comprising the amino acid sequence SEQ ID NO: 1541, and c. CDR-L3, comprising the amino acid sequence SEQ ID NO: 2083.

[2322] In one aspect, an antibody or antigen-binding fragment thereof is provided, wherein the antibody or antigen-binding fragment thereof comprises a VH as in any of the embodiments provided above, and a VL as in any of the embodiments provided above. In some embodiments, the antibody or antigen-binding fragment thereof comprises the VH amino acid sequence of SEQ ID NO: 186, and the VL amino acid sequence of SEQ ID NO: 457, optionally including post-translational modifications of those sequences.

### TMEL1032

[2323] In one aspect, the present disclosure provides an antibody or antigen-binding fragment thereof comprising at least one or both variable regions selected from: a. VH comprising the amino acid sequence of SEQ ID NO: 187 and b. VL comprising the amino acid sequence of SEQ ID NO: 458.

[2324] In one aspect, the present disclosure provides an antibody or antigen-binding fragment thereof comprising at least one, two, three, four, five, or six CDRs selected from: a. CDR-H1 comprising the amino acid sequence of SEQ ID NO: 729, b. CDR-H2 comprising the amino acid sequence of SEQ ID NO: 1271, c. CDR-H3 comprising the amino acid sequence of SEQ ID NO: 1813, d. CDR-L1 comprising the amino acid sequence of SEQ ID NO: 1000, e. CDR-L2 comprising the amino acid sequence of SEQ ID NO: 1542, and f. CDR-L3 comprising the amino acid sequence of SEQ ID NO: 2084.

[2325] In one aspect, the present disclosure provides an antibody or antigen-binding fragment thereof comprising a CDR-H3 comprising the amino acid sequence of SEQ ID NO: 1813, d. CDR-L1 comprising the amino acid sequence of SEQ ID NO: 1000 and a CDR-L3 comprising the amino acid sequence of SEQ ID NO: 2084.

[2326] In one aspect, the present disclosure provides an antibody or antigen-binding fragment thereof comprising at least one, at least two, or all three VH CDR sequences selected from: a. CDR-H1 comprising the amino acid sequence of SEQ ID NO: 729, b. CDR-H2 comprising the amino acid sequence of SEQ ID NO: 1271, c. CDR-H3 comprising the amino acid sequence of SEQ ID NO: 1813, and a VL comprising the amino acid sequence of SEQ ID NO: 458.

[2327] In one aspect, the present disclosure provides an antibody or antigen-binding fragment thereof comprising at least one, at least two, or all three VL CDR sequences selected from: a. CDR-L1 comprising the amino acid sequence of SEQ ID NO: 1000, b. CDR-L2 comprising the amino acid sequence of SEQ ID NO: 1542, c. CDR-L3 comprising the amino acid sequence of SEQ ID NO: 2084, and a VH comprising the amino acid sequence of SEQ ID NO: 187.

[2328] In one aspect, an antibody or antigen-binding fragment thereof is provided, wherein the antibody or antigen-binding fragment thereof comprises a heavy chain variable domain (VH) having at least 90%, 91%, 92%, 93%, 94%, 95%, 96%, 97%, 98%, 99%, or 100% sequence identity to the amino acid sequence SEQ ID NO: 187. In some embodiments, a VH sequence having at least 90%, 91%, 92%, 93%, 94%, 95%, 96%, 97%, 98%, or 99% identity contains substitutions (e.g., conservative substitutions), insertions, or deletions relative to the reference sequence, but an antibody or antigen-binding fragment thereof comprising that sequence retains the ability to bind to same antigen as of the parent (e.g., cancer associated antigen). In some embodiments, a total of 1 to 10 amino acids have been substituted, inserted and/or deleted in the amino acid sequence SEQ ID NO: 187. In some embodiments, substitutions, insertions, or deletions occur in regions outside the CDRs (e.g., in the FRs). Optionally, the antibody or antigen-binding fragment thereof comprises the VH sequence SEQ ID NO: 187, including one or more post-translational modifications of that sequence. In a particular embodiment, the VH comprises one, two or three CDRs selected from: a. CDR-H1, comprising the amino acid sequence SEQ ID NO: 729, b. CDR-H2, comprising the amino acid sequence SEQ ID NO: 1271, and c. CDR-H3, comprising the amino acid sequence SEQ ID NO: 1813.

[2329] In one aspect, an antibody or antigen-binding fragment thereof is provided, wherein the antibody or antigen-binding fragment thereof comprises a light chain variable domain (VL) having at least 90%, 91%, 92%, 93%, 94%, 95%, 96%, 97%, 98%, 99%, or 100% sequence identity to the amino acid sequence SEQ ID NO: 458. In some embodiments, a VL sequence having at least 90%, 91%, 92%, 93%, 94%, 95%, 96%, 97%, 98%, or 99% identity contains substitutions (e.g., conservative substitutions), insertions, or deletions relative to the reference sequence, but an antibody or antigen-binding fragment thereof comprising that sequence retains the ability to bind to same antigen as the parent (e.g., cancer associated antigen). In some embodiments, a total of 1 to 10 amino acids have been substituted, inserted and/or deleted in the amino acid sequence SEQ ID NO: 458. In some embodiments, the substitutions, insertions, or deletions occur in regions outside the CDRs (e.g., in the FRs). Optionally, the antibody or antigen-binding fragment thereof comprises the VL sequence SEQ ID NO: 458, including one or more post-translational modifications of that sequence. In a particular embodiment, the VL comprises one, two or three CDRs selected from: a. CDR-L1, comprising the amino acid sequence SEQ ID NO: 1000, b. CDR-L2, comprising the amino acid sequence SEQ ID NO: 1542, and c. CDR-L3, comprising the amino acid sequence SEQ ID NO: 2084.

[2330] In one aspect, an antibody or antigen-binding fragment thereof is provided, wherein the antibody or antigen-binding fragment thereof comprises a VH as in any of the embodiments provided above, and a VL as in any of the embodiments provided above. In some embodiments, the antibody or antigen-binding fragment thereof comprises the VH amino acid sequence of SEQ ID NO: 187, and the VL amino acid sequence of SEQ ID NO: 458, optionally including post-translational modifications of those sequences.

### TMEL1033

[2331] In one aspect, the present disclosure provides an antibody or antigen-binding fragment thereof comprising at least one or both variable regions selected from: a. VH comprising the amino acid sequence of SEQ ID NO: 188 and b. VL comprising the amino acid sequence of SEQ ID NO: 459.

[2332] In one aspect, the present disclosure provides an antibody or antigen-binding fragment thereof comprising at least one, two, three, four, five, or six CDRs selected from: a. CDR-H1 comprising the amino acid sequence of SEQ ID NO: 730, b. CDR-H2 comprising the amino acid sequence of SEQ ID NO: 1272, c. CDR-H3 comprising the amino acid sequence of SEQ ID NO: 1814, d. CDR-L1 comprising the amino acid sequence of SEQ ID NO: 1001, e. CDR-L2 comprising the amino acid sequence of SEQ ID NO: 1543, and f. CDR-L3 comprising the amino acid sequence of SEQ ID NO: 2085.

[2333] In one aspect, the present disclosure provides an antibody or antigen-binding fragment thereof comprising a CDR-H3 comprising the amino acid sequence of SEQ ID NO: 1814, and a CDR-L3 comprising the amino acid sequence of SEQ ID NO: 2085.

[2334] In one aspect, the present disclosure provides an antibody or antigen-binding fragment thereof comprising at least one, at least two, or all three VH CDR sequences selected from: a. CDR-H1 comprising the amino acid sequence of SEQ ID NO: 730, b. CDR-H2 comprising the amino acid sequence of SEQ ID NO: 1272, c. CDR-H3 comprising the amino acid sequence of SEQ ID NO: 1814, and a VL comprising the amino acid sequence of SEQ ID NO: 459.

[2335] In one aspect, the present disclosure provides an antibody or antigen-binding fragment thereof comprising at least one, at least two, or all three VL CDR sequences selected from: a. CDR-L1 comprising the amino acid sequence of SEQ ID NO: 1001, b. CDR-L2 comprising the amino acid sequence of SEQ ID NO: 1543, c. CDR-L3 comprising the amino acid sequence of SEQ ID NO: 2085, and a VH comprising the amino acid sequence of SEQ ID NO: 188.

[2336] In one aspect, an antibody or antigen-binding fragment thereof is provided, wherein the antibody or antigen-binding fragment thereof comprises a heavy chain variable domain (VH) having at least 90%, 91%, 92%, 93%, 94%, 95%, 96%, 97%, 98%, 99%, or 100% sequence identity to the amino acid sequence SEQ ID NO: 188. In some embodiments, a VH sequence having at least 90%, 91%, 92%, 93%, 94%, 95%, 96%, 97%, 98%, or 99% identity contains substitutions (e.g., conservative substitutions), insertions, or deletions relative to the reference sequence, but an antibody or antigen-binding fragment thereof comprising that sequence retains the ability to bind to same antigen as of the parent (e.g., cancer associated antigen). In some embodiments, a total of 1 to 10 amino acids have been substituted, inserted and/or deleted in the amino acid sequence SEQ ID NO: 188. In some embodiments, substitutions, insertions, or deletions occur in regions outside the CDRs (e.g., in the FRs). Optionally, the antibody or antigen-binding fragment thereof comprises the VH sequence SEQ ID NO: 188, including one or more post-translational modifications of that sequence. In a particular embodiment, the VH comprises one, two or three CDRs selected from: a. CDR-H1, comprising the amino acid sequence SEQ ID NO: 730, b. CDR-H2, comprising the amino acid sequence SEQ ID NO: 1272, and c. CDR-H3, comprising the amino acid sequence SEQ ID NO: 1814.

[2337] In one aspect, an antibody or antigen-binding fragment thereof is provided, wherein the antibody or antigen-binding fragment thereof comprises a light chain variable domain (VL) having at least 90%, 91%, 92%, 93%, 94%, 95%, 96%, 97%, 98%, 99%, or 100% sequence identity to the amino acid sequence SEQ ID NO: 459. In some embodiments, a VL sequence having at least 90%, 91%, 92%, 93%, 94%, 95%, 96%, 97%, 98%, or 99% identity contains substitutions (e.g., conservative substitutions), insertions, or deletions relative to the reference sequence, but an antibody or antigen-binding fragment thereof comprising that sequence retains the ability to bind to same antigen as the parent (e.g., cancer associated antigen). In some embodiments, a total of 1 to 10 amino acids have been substituted, inserted and/or deleted in the amino acid sequence SEQ ID NO: 459. In some embodiments, the substitutions, insertions, or deletions occur in regions outside the CDRs (e.g., in the FRs). Optionally, the antibody or antigen-binding fragment thereof comprises the VL sequence SEQ ID NO: 459, including one or more post-translational modifications of that sequence. In a particular embodiment, the VL comprises one, two or three CDRs selected from: a. CDR-L1, comprising the amino acid sequence SEQ ID NO: 1001, b. CDR-L2, comprising the amino acid sequence SEQ ID NO: 1543, and c. CDR-L3, comprising the amino acid sequence SEQ ID NO: 2085.

[2338] In one aspect, an antibody or antigen-binding fragment thereof is provided, wherein the antibody or antigen-binding fragment thereof comprises a VH as in any of the embodiments provided above, and a VL as in any of the embodiments provided above. In some embodiments, the antibody or antigen-binding fragment thereof comprises the VH amino acid sequence of SEQ ID NO: 188, and the VL amino acid sequence of SEQ ID NO: 459, optionally including post-translational modifications of those sequences.

### TMEL1034

[2339] In one aspect, the present disclosure provides an antibody or antigen-binding fragment thereof comprising at least one or both variable regions selected from: a. VH comprising the amino acid sequence of SEQ ID NO: 189 and b. VL comprising the amino acid sequence of SEQ ID NO: 460.

[2340] In one aspect, the present disclosure provides an antibody or antigen-binding fragment thereof comprising at least one, two, three, four, five, or six CDRs selected from: a. CDR-H1 comprising the amino acid sequence of SEQ ID NO: 731, b. CDR-H2 comprising the amino acid sequence of SEQ ID NO: 1273, c. CDR-H3 comprising the amino acid sequence of SEQ ID NO: 1815, d. CDR-L1 comprising the amino acid sequence of SEQ ID NO: 1002, e. CDR-L2 comprising the amino acid sequence of SEQ ID NO: 1544, and f. CDR-L3 comprising the amino acid sequence of SEQ ID NO: 2086.

[2341] In one aspect, the present disclosure provides an antibody or antigen-binding fragment thereof comprising a CDR-H3 comprising the amino acid sequence of SEQ ID NO: 1815, and a CDR-L3 comprising the amino acid sequence of SEQ ID NO: 2086.

[2342] In one aspect, the present disclosure provides an antibody or antigen-binding fragment thereof comprising at least one, at least two, or all three VH CDR sequences selected from: a. CDR-H1 comprising the amino acid sequence of SEQ ID NO: 731, b. CDR-H2 comprising the amino acid sequence of SEQ ID NO: 1273, c. CDR-H3 comprising the amino acid sequence of SEQ ID NO: 1815, and a VL comprising the amino acid sequence of SEQ ID NO: 460.

[2343] In one aspect, the present disclosure provides an antibody or antigen-binding fragment thereof comprising at least one, at least two, or all three VL CDR sequences selected from: a. CDR-L1 comprising the amino acid sequence of SEQ ID NO: 1002, b. CDR-L2 comprising the amino acid sequence of SEQ ID NO: 1544, c. CDR-L3 comprising the amino acid sequence of SEQ ID NO: 2086, and a VH comprising the amino acid sequence of SEQ ID NO: 189.

[2344] In one aspect, an antibody or antigen-binding fragment thereof is provided, wherein the antibody or antigen-binding fragment thereof comprises a heavy chain variable domain (VH) having at least 90%, 91%, 92%, 93%, 94%, 95%, 96%, 97%, 98%, 99%, or 100% sequence identity to the amino acid sequence SEQ ID NO: 189. In some embodiments, a VH sequence having at least 90%, 91%, 92%, 93%, 94%, 95%, 96%, 97%, 98%, or 99% identity contains substitutions (e.g., conservative substitutions), insertions, or deletions relative to the reference sequence, but an antibody or antigen-binding fragment thereof comprising that sequence retains the ability to bind to same antigen as of the parent (e.g., cancer associated antigen). In some embodiments, a total of 1 to 10 amino acids have been substituted, inserted and/or deleted in the amino acid sequence SEQ ID NO: 189. In some embodiments, substitutions, antigen-binding fragment thereof comprises the VH sequence SEQ ID NO: 189, including one or more post-translational modifications of that sequence. In a particular embodiment, the VH comprises one, two or three CDRs selected from: a. CDR-H1, comprising the amino acid sequence SEQ ID NO: 731, b. CDR-H2, comprising the amino acid sequence SEQ ID NO: 1273, and c. CDR-H3, comprising the amino acid sequence SEQ ID NO: 1815.

[2345] In one aspect, an antibody or antigen-binding fragment thereof is provided, wherein the antibody or antigen-binding fragment thereof comprises a light chain variable domain (VL) having at least 90%, 91%, 92%, 93%, 94%, 95%, 96%, 97%, 98%, 99%, or 100% sequence identity to the amino acid sequence SEQ ID NO: 460. In some embodiments, a VL sequence having at least 90%, 91%, 92%, 93%, 94%, 95%, 96%, 97%, 98%, or 99% identity contains substitutions (e.g., conservative substitutions), insertions, or deletions relative to the reference sequence, but an antibody or antigen-binding fragment thereof comprising that sequence retains the ability to bind to same antigen as the parent (e.g., cancer associated antigen). In some embodiments, a total of 1 to 10 amino acids have been substituted, inserted and/or deleted in the amino acid sequence SEQ ID NO: 460. In some embodiments, the substitutions, insertions, or deletions occur in regions outside the CDRs (e.g., in the FRs). Optionally, the antibody or antigen-binding fragment thereof comprises the VL sequence SEQ ID NO: 460, including one or more post-translational modifications of that sequence. In a particular embodiment, the VL comprises one, two or three CDRs selected from: a. CDR-L1, comprising the amino acid sequence SEQ ID NO: 1002, b. CDR-L2, comprising the amino acid sequence SEQ ID NO: 1544, and c. CDR-L3, comprising the amino acid sequence SEQ ID NO: 2086.

[2346] In one aspect, an antibody or antigen-binding fragment thereof is provided, wherein the antibody or antigen-binding fragment thereof comprises a VH as in any of the embodiments provided above, and a VL as in any of the embodiments provided above. In some embodiments, the antibody or antigen-binding fragment thereof comprises the VH amino acid sequence of SEQ ID NO: 189, and the VL amino acid sequence of SEQ ID NO: 460, optionally including post-translational modifications of those sequences.

### TMEL1035

[2347] In one aspect, the present disclosure provides an antibody or antigen-binding fragment thereof comprising at least one or both variable regions selected from: a. VH comprising the amino acid sequence of SEQ ID NO: 190 and b. VL comprising the amino acid sequence of SEQ ID NO: 461.

[2348] In one aspect, the present disclosure provides an antibody or antigen-binding fragment thereof comprising at least one, two, three, four, five, or six CDRs selected from: a. CDR-H1 comprising the amino acid sequence of SEQ ID NO: 732, b. CDR-H2 comprising the amino acid sequence of SEQ ID NO: 1274, c. CDR-H3 comprising the amino acid sequence of SEQ ID NO: 1816, d. CDR-L1 comprising the amino acid sequence of SEQ ID NO: 1003, e. CDR-L2 comprising the amino acid sequence of SEQ ID NO: 1545, and f. CDR-L3 comprising the amino acid sequence of SEQ ID NO: 2087.

[2349] In one aspect, the present disclosure provides an antibody or antigen-binding fragment thereof comprising a CDR-H3 comprising the amino acid sequence of SEQ ID NO: 1816, and a CDR-L3 comprising the amino acid sequence of SEQ ID NO: 2087.

[2350] In one aspect, the present disclosure provides an antibody or antigen-binding fragment thereof comprising at least one, at least two, or all three VH CDR sequences selected from: a. CDR-H1 comprising the amino acid sequence of SEQ ID NO: 732, b. CDR-H2 comprising the amino acid sequence of SEQ ID NO: 1274, c. CDR-H3 comprising the amino acid sequence of SEQ ID NO: 1816, and a VL comprising the amino acid sequence of SEQ ID NO: 461.

[2351] In one aspect, the present disclosure provides an antibody or antigen-binding fragment thereof comprising at least one, at least two, or all three VL CDR sequences selected from: a. CDR-L1 comprising the amino acid sequence of SEQ ID NO: 1003, b. CDR-L2 comprising the amino acid sequence of SEQ ID NO: 1545, c. CDR-L3 comprising the amino acid sequence of SEQ ID NO: 2087, and a VH comprising the amino acid sequence of SEQ ID NO: 190.

[2352] In one aspect, an antibody or antigen-binding fragment thereof is provided, wherein the antibody or antigen-binding fragment thereof comprises a heavy chain variable domain (VH) having at least 90%, 91%, 92%, 93%, 94%, 95%, 96%, 97%, 98%, 99%, or 100% sequence identity to the amino acid sequence SEQ ID NO: 190. In some embodiments, a VH sequence having at least 90%, 91%, 92%, 93%, 94%, 95%, 96%, 97%, 98%, or 99% identity contains substitutions (e.g., conservative substitutions), insertions, or deletions relative to the reference sequence, but an antibody or antigen-binding fragment thereof comprising that sequence retains the ability to bind to same antigen as of the parent (e.g., cancer associated antigen). In some embodiments, a total of 1 to 10 amino acids have been substituted, inserted and/or deleted in the amino acid sequence SEQ ID NO: 190. In some embodiments, substitutions, insertions, or deletions occur in regions outside the CDRs (e.g., in the FRs). Optionally, the antibody or antigen-binding fragment thereof comprises the VH sequence SEQ ID NO: 190, including one or more post-translational modifications of that sequence. In a particular embodiment, the VH comprises one, two or three CDRs selected from: a. CDR-H1, comprising the amino acid sequence SEQ ID NO: 732, b. CDR-H2, comprising the amino acid sequence SEQ ID NO: 1274, and c. CDR-H3, comprising the amino acid sequence SEQ ID NO: 1816.

[2353] In one aspect, an antibody or antigen-binding fragment thereof is provided, wherein the antibody or antigen-binding fragment thereof comprises a light chain variable domain (VL) having at least 90%, 91%, 92%, 93%, 94%, 95%, 96%, 97%, 98%, 99%, or 100% sequence identity to the amino acid sequence SEQ ID NO: 461. In some embodiments, a VL sequence having at least 90%, 91%, 92%, 93%, 94%, 95%, 96%, 97%, 98%, or 99% identity contains substitutions (e.g., conservative substitutions), insertions, or deletions relative to the reference sequence, but an antibody or antigen-binding fragment thereof comprising that sequence retains the ability to bind to same antigen as the parent (e.g., cancer associated antigen). In some embodiments, a total of 1 to 10 amino acids have been substituted, inserted and/or deleted in the amino acid sequence SEQ ID NO: 461. In some embodiments, the substitutions, insertions, or deletions occur in regions outside the CDRs (e.g., in the FRs). Optionally, the antibody or antigen-binding fragment thereof comprises the VL sequence SEQ ID NO: 461, including one or more post-translational modifications of that sequence. In a particular embodiment, the VL comprises one, two or three CDRs selected from: a. CDR-L1, comprising the amino acid sequence SEQ ID NO: 1003, b. CDR-L2, comprising the amino acid sequence SEQ ID NO: 1545, and c. CDR-L3, comprising the amino acid sequence SEQ ID NO: 2087.

[2354] In one aspect, an antibody or antigen-binding fragment thereof is provided, wherein the antibody or antigen-binding fragment thereof comprises a VH as in any of the embodiments provided above, and a VL as in any of the embodiments provided above. In some embodiments, the antibody or antigen-binding fragment thereof comprises the VH amino acid sequence of SEQ ID NO: 190, and the VL amino acid sequence of SEQ ID NO: 461, optionally including post-translational modifications of those sequences.

### TMEL1036

[2355] In one aspect, the present disclosure provides an antibody or antigen-binding fragment thereof comprising at least one or both variable regions selected from: a. VH comprising the amino acid sequence of SEQ ID NO: 191 and b. VL comprising the amino acid sequence of SEQ ID NO: 462.

[2356] In one aspect, the present disclosure provides an antibody or antigen-binding fragment thereof comprising at least one, two, three, four, five, or six CDRs selected from: a. CDR-H1 comprising the amino acid sequence of SEQ ID NO: 733, b. CDR-H2 comprising the amino acid sequence of SEQ ID NO: 1275, c. CDR-H3 comprising the amino acid sequence of SEQ ID NO: 1817, d. CDR-L1 comprising the amino acid sequence of SEQ ID NO: 1004, e. CDR-L2 comprising the amino acid sequence of SEQ ID NO: 1546, and f. CDR-L3 comprising the amino acid sequence of SEQ ID NO: 2088.

[2357] In one aspect, the present disclosure provides an antibody or antigen-binding fragment thereof comprising a CDR-H3 comprising the amino acid sequence of SEQ ID NO: 1817, and a CDR-L3 comprising the amino acid sequence of SEQ ID NO: 2088.

[2358] In one aspect, the present disclosure provides an antibody or antigen-binding fragment thereof comprising at least one, at least two, or all three VH CDR sequences selected from: a. CDR-H1 comprising the amino acid sequence of SEQ ID NO: 733, b. CDR-H2 comprising the amino acid sequence of SEQ ID NO: 1275, c. CDR-H3 comprising the amino acid sequence of SEQ ID NO: 1817, and a VL comprising the amino acid sequence of SEQ ID NO: 462.

[2359] In one aspect, the present disclosure provides an antibody or antigen-binding fragment thereof comprising at least one, at least two, or all three VL CDR sequences selected from: a CDR-L1 comprising the amino acid sequence of SEQ ID NO: 1004, b CDR-L2 comprising the amino acid sequence of SEQ ID NO: 1546, c. CDR-L3 comprising the amino acid sequence of SEQ ID NO: 2088, and a VH comprising the amino acid sequence of SEQ ID NO: 191.

[2360] In one aspect, an antibody or antigen-binding fragment thereof is provided, wherein the antibody or antigen-binding fragment thereof comprises a heavy chain variable domain (VH) having at least 90%, 91%, 92%, 93%, 94%, 95%, 96%, 97%, 98%, 99%, or 100% sequence identity to the amino acid sequence SEQ ID NO: 191. In some embodiments, a VH sequence having at least 90%, 91%, 92%, 93%, 94%, 95%, 96%, 97%, 98%, or 99% identity contains substitutions (e.g., conservative substitutions), insertions, or deletions relative to the reference sequence, but an antibody or antigen-binding fragment thereof comprising that sequence retains the ability to bind to same antigen as of the parent (e.g., cancer associated antigen). In some embodiments, a total of 1 to 10 amino acids have been substituted, inserted and/or deleted in the amino acid sequence SEQ ID NO: 191. In some embodiments, substitutions, insertions, or deletions occur in regions outside the CDRs (e.g., in the FRs). Optionally, the antibody or antigen-binding fragment thereof comprises the VH sequence SEQ ID NO: 191, including one or more post-translational modifications of that sequence. In a particular embodiment, the VH comprises one, two or three CDRs selected from: a. CDR-H1, comprising the amino acid sequence SEQ ID NO: 733, b. CDR-H2, comprising the amino acid sequence SEQ ID NO: 1275, and c. CDR-H3, comprising the amino acid sequence SEQ ID NO: 1817.

[2361] In one aspect, an antibody or antigen-binding fragment thereof is provided, wherein the antibody or antigen-binding fragment thereof comprises a light chain variable domain (VL) having at least 90%, 91%, 92%, 93%, 94%, 95%, 96%, 97%, 98%, 99%, or 100% sequence identity to the amino acid sequence SEQ ID NO: 462. In some embodiments, a VL sequence having at least 90%, 91%, 92%, 93%, 94%, 95%, 96%, 97%, 98%, or 99% identity contains substitutions (e.g., conservative substitutions), insertions, or deletions relative to the reference sequence, but an antibody or antigen-binding fragment thereof comprising that sequence retains the ability to bind to same antigen as the parent (e.g., cancer associated antigen). In some embodiments, a total of 1 to 10 amino acids have been substituted, inserted and/or deleted in the amino acid sequence SEQ ID NO: 462. In some embodiments, the substitutions, insertions, or deletions occur in regions outside the CDRs (e.g., in the FRs). Optionally, the antibody or antigen-binding fragment thereof comprises the VL sequence SEQ ID NO: 462, including one or more post-translational modifications of that sequence. In a particular embodiment, the VL comprises one, two or three CDRs selected from: a. CDR-L1, comprising the amino acid sequence SEQ ID NO: 1004, b. CDR-L2, comprising the amino acid sequence SEQ ID NO: 1546, and c. CDR-L3, comprising the amino acid sequence SEQ ID NO: 2088.

[2362] In one aspect, an antibody or antigen-binding fragment thereof is provided, wherein the antibody or antigen-binding fragment thereof comprises a VH as in any of the embodiments provided above, and a VL as in any of the embodiments provided above. In some embodiments, the antibody or antigen-binding fragment thereof comprises the VH amino acid sequence of SEQ ID NO: 191, and the VL amino acid sequence of SEQ ID NO: 462, optionally including post-translational modifications of those sequences.

### TMEL1037

[2363] In one aspect, the present disclosure provides an antibody or antigen-binding fragment thereof comprising at least one or both variable regions selected from: a. VH comprising the amino acid sequence of SEQ ID NO: 192 and b. VL comprising the amino acid sequence of SEQ ID NO: 463.

[2364] In one aspect, the present disclosure provides an antibody or antigen-binding fragment thereof comprising at least one, two, three, four, five, or six CDRs selected from: a. CDR-H1 comprising the amino acid sequence of SEQ ID NO: 734, b. CDR-H2 comprising the amino acid sequence of SEQ ID NO: 1276, c. CDR-H3 comprising the amino acid sequence of SEQ ID NO: 1818, d. CDR-L1 comprising the amino acid sequence of SEQ ID NO: 1005, e. CDR-L2 comprising the amino acid sequence of SEQ ID NO: 1547, and f. CDR-L3 comprising the amino acid sequence of SEQ ID NO: 2089.

[2365] In one aspect, the present disclosure provides an antibody or antigen-binding fragment thereof comprising a CDR-H3 comprising the amino acid sequence of SEQ ID NO: 1818, and a CDR-L3 comprising the amino acid sequence of SEQ ID NO: 2089.

[2366] In one aspect, the present disclosure provides an antibody or antigen-binding fragment thereof comprising at least one, at least two, or all three VH CDR sequences selected from: a. CDR-H1 comprising the amino acid sequence of SEQ ID NO: 734, b. CDR-H2 comprising the amino acid sequence of SEQ ID NO: 1276, c. CDR-H3 comprising the amino acid sequence of SEQ ID NO: 1818, and d. VL comprising the amino acid sequence of SEQ ID NO: 463.

[2367] In one aspect, the present disclosure provides an antibody or antigen-binding fragment thereof comprising at least one, at least two, or all three VL CDR sequences selected from: a. CDR-L1 comprising the amino acid sequence of SEQ ID NO: 1005, b. CDR-L2 comprising the amino acid sequence of SEQ ID NO: 1547, c. CDR-L3 comprising the amino acid sequence of SEQ ID NO: 2089, and a VH comprising the amino acid sequence of SEQ ID NO: 192.

[2368] In one aspect, an antibody or antigen-binding fragment thereof is provided, wherein the antibody or antigen-binding fragment thereof comprises a heavy chain variable domain (VH) having at least 90%, 91%, 92%, 93%, 94%, 95%, 96%, 97%, 98%, 99%, or 100% sequence identity to the amino acid sequence SEQ ID NO: 192. In some embodiments, a VH sequence having at least 90%, 91%, 92%, 93%, 94%, 95%, 96%, 97%, 98%, or 99% identity contains substitutions (e.g., conservative substitutions), insertions, or deletions relative to the reference sequence, but an antibody or antigen-binding fragment thereof comprising that sequence retains the ability to bind to same antigen as of the parent (e.g., cancer associated antigen). In some embodiments, a total of 1 to 10 amino acids have been substituted, inserted and/or deleted in the amino acid sequence SEQ ID NO: 192. In some embodiments, substitutions, insertions, or deletions occur in regions outside the CDRs (e.g., in the FRs). Optionally, the antibody or antigen-binding fragment thereof comprises the VH sequence SEQ ID NO: 192, including one or more post-translational modifications of that sequence. In a particular embodiment, the VH comprises one, two or three CDRs selected from: a. CDR-H1, comprising the amino acid sequence SEQ ID NO: 734, b. CDR-H2, comprising the amino acid sequence SEQ ID NO: 1276, and c. CDR-H3, comprising the amino acid sequence SEQ ID NO: 1818.

[2369] In one aspect, an antibody or antigen-binding fragment thereof is provided, wherein the antibody or antigen-binding fragment thereof comprises a light chain variable domain (VL) having at least 90%, 91%, 92%, 93%, 94%, 95%, 96%, 97%, 98%, 99%, or 100% sequence identity to the amino acid sequence SEQ ID NO: 463. In some embodiments, a VL sequence having at least 90%, 91%, 92%, 93%, 94%, 95%, 96%, 97%, 98%, or 99% identity contains substitutions (e.g., conservative substitutions), insertions, or deletions relative to the reference sequence, but an antibody or antigen-binding fragment thereof comprising that sequence retains the ability to bind to same antigen as the parent (e.g., cancer associated antigen). In some embodiments, a total of 1 to 10 amino acids have been substituted, inserted and/or deleted in the amino acid sequence SEQ ID NO: 463. In some embodiments, the substitutions, antigen-binding fragment thereof comprises the VL sequence SEQ ID NO: 463, including one or more post-translational modifications of that sequence. In a particular embodiment, the VL comprises one, two or three CDRs selected from: a. CDR-L1, comprising the amino acid sequence SEQ ID NO: 1005, b. CDR-L2, comprising the amino acid sequence SEQ ID NO: 1547, and c. CDR-L3, comprising the amino acid sequence SEQ ID NO: 2089.

[2370] In one aspect, an antibody or antigen-binding fragment thereof is provided, wherein the antibody or antigen-binding fragment thereof comprises a VH as in any of the embodiments provided above, and a VL as in any of the embodiments provided above. In some embodiments, the antibody or antigen-binding fragment thereof comprises the VH amino acid sequence of SEQ ID NO: 192, and the VL amino acid sequence of SEQ ID NO: 463, optionally including post-translational modifications of those sequences.

### TMEL1038

[2371] In one aspect, the present disclosure provides an antibody or antigen-binding fragment thereof comprising at least one or both variable regions selected from: a. VH comprising the amino acid sequence of SEQ ID NO: 193 and b. VL comprising the amino acid sequence of SEQ ID NO: 464.

[2372] In one aspect, the present disclosure provides an antibody or antigen-binding fragment thereof comprising at least one, two, three, four, five, or six CDRs selected from: a. CDR-H1 comprising the amino acid sequence of SEQ ID NO: 735, b. CDR-H2 comprising the amino acid sequence of SEQ ID NO: 1277, c. CDR-H3 comprising the amino acid sequence of SEQ ID NO: 1819, d. CDR-L1 comprising the amino acid sequence of SEQ ID NO: 1006, e. CDR-L2 comprising the amino acid sequence of SEQ ID NO: 1548, and f. CDR-L3 comprising the amino acid sequence of SEQ ID NO: 2090.

[2373] In one aspect, the present disclosure provides an antibody or antigen-binding fragment thereof comprising a CDR-H3 comprising the amino acid sequence of SEQ ID NO: 1819, and a CDR-L3 comprising the amino acid sequence of SEQ ID NO: 2090.

[2374] In one aspect, the present disclosure provides an antibody or antigen-binding fragment thereof comprising at least one, at least two, or all three VH CDR sequences selected from: a. CDR-H1 comprising the amino acid sequence of SEQ ID NO: 735, b. CDR-H2 comprising the amino acid sequence of SEQ ID NO: 1277, c. CDR-H3 comprising the amino acid sequence of SEQ ID NO: 1819, and a VL comprising the amino acid sequence of SEQ ID NO: 464.

[2375] In one aspect, the present disclosure provides an antibody or antigen-binding fragment thereof comprising at least one, at least two, or all three VL CDR sequences selected from: a. CDR-L1 comprising the amino acid sequence of SEQ ID NO: 1006, b. CDR-L2 comprising the amino acid sequence of SEQ ID NO: 1548, c. CDR-L3 comprising the amino acid sequence of SEQ ID NO: 2090, and a VH comprising the amino acid sequence of SEQ ID NO: 193.

[2376] In one aspect, an antibody or antigen-binding fragment thereof is provided, wherein the antibody or antigen-binding fragment thereof comprises a heavy chain variable domain (VH) having at least 90%, 91%, 92%, 93%, 94%, 95%, 96%, 97%, 98%, 99%, or 100% sequence identity to the amino acid sequence SEQ ID NO: 193. In some embodiments, a VH sequence having at least 90%, 91%, 92%, 93%, 94%, 95%, 96%, 97%, 98%, or 99% identity contains substitutions (e.g., conservative substitutions), thereof comprising that sequence retains the ability to bind to same antigen as of the parent (e.g., cancer associated antigen). In some embodiments, a total of 1 to 10 amino acids have been substituted, inserted and/or deleted in the amino acid sequence SEQ ID NO: 193. In some embodiments, substitutions, insertions, or deletions occur in regions outside the CDRs (e.g., in the FRs). Optionally, the antibody or antigen-binding fragment thereof comprises the VH sequence SEQ ID NO: 193, including one or more post-translational modifications of that sequence. In a particular embodiment, the VH comprises one, two or three CDRs selected from: a. CDR-H1, comprising the amino acid sequence SEQ ID NO: 735, b. CDR-H2, comprising the amino acid sequence SEQ ID NO: 1277, and c. CDR-H3, comprising the amino acid sequence SEQ ID NO: 1819.

[2377] In one aspect, an antibody or antigen-binding fragment thereof is provided, wherein the antibody or antigen-binding fragment thereof comprises a light chain variable domain (VL) having at least 90%, 91%, 92%, 93%, 94%, 95%, 96%, 97%, 98%, 99%, or 100% sequence identity to the amino acid sequence SEQ ID NO: 464. In some embodiments, a VL sequence having at least 90%, 91%, 92%, 93%, 94%, 95%, 96%, 97%, 98%, or 99% identity contains substitutions (e.g., conservative substitutions), insertions, or deletions relative to the reference sequence, but an antibody or antigen-binding fragment thereof comprising that sequence retains the ability to bind to same antigen as the parent (e.g., cancer associated antigen). In some embodiments, a total of 1 to 10 amino acids have been substituted, inserted and/or deleted in the amino acid sequence SEQ ID NO: 464. In some embodiments, the substitutions, insertions, or deletions occur in regions outside the CDRs (e.g., in the FRs). Optionally, the antibody or antigen-binding fragment thereof comprises the VL sequence SEQ ID NO: 464, including one or more post-translational modifications of that sequence. In a particular embodiment, the VL comprises one, two or three CDRs selected from: a. CDR-L1, comprising the amino acid sequence SEQ ID NO: 1006, b. CDR-L2, comprising the amino acid sequence SEQ ID NO: 1548, and c. CDR-L3, comprising the amino acid sequence SEQ ID NO: 2090.

[2378] In one aspect, an antibody or antigen-binding fragment thereof is provided, wherein the antibody or antigen-binding fragment thereof comprises a VH as in any of the embodiments provided above, and a VL as in any of the embodiments provided above. In some embodiments, the antibody or antigen-binding fragment thereof comprises the VH amino acid sequence of SEQ ID NO: 193, and the VL amino acid sequence of SEQ ID NO: 464, optionally including post-translational modifications of those sequences.

### TMEL1039

[2379] In one aspect, the present disclosure provides an antibody or antigen-binding fragment thereof comprising at least one or both variable regions selected from: a. VH comprising the amino acid sequence of SEQ ID NO: 194 and b. VL comprising the amino acid sequence of SEQ ID NO: 465.

[2380] In one aspect, the present disclosure provides an antibody or antigen-binding fragment thereof comprising at least one, two, three, four, five, or six CDRs selected from: a. CDR-H1 comprising the amino acid sequence of SEQ ID NO: 736, b. CDR-H2 comprising the amino acid sequence of SEQ ID NO: 1278, c. CDR-H3 comprising the amino acid sequence of SEQ ID NO: 1820, d. CDR-L1 comprising the amino acid sequence of SEQ ID NO: 1007, e. CDR-L2 comprising the amino acid sequence of SEQ ID NO: 1549, and f. CDR-L3 comprising the amino acid sequence of SEQ ID NO: 2091.

[2381] In one aspect, the present disclosure provides an antibody or antigen-binding fragment thereof comprising a CDR-H3 comprising the amino acid sequence of SEQ ID NO: 1820, and a CDR-L3 comprising the amino acid sequence of SEQ ID NO: 2091.

[2382] In one aspect, the present disclosure provides an antibody or antigen-binding fragment thereof comprising at least one, at least two, or all three VH CDR sequences selected from: a. CDR-H1 comprising the amino acid sequence of SEQ ID NO: 736, b. CDR-H2 comprising the amino acid sequence of SEQ ID NO: 1278, c. CDR-H3 comprising the amino acid sequence of SEQ ID NO: 1820, and a VL comprising the amino acid sequence of SEQ ID NO: 465.

[2383] In one aspect, the present disclosure provides an antibody or antigen-binding fragment thereof comprising at least one, at least two, or all three VL CDR sequences selected from: a. CDR-L1 comprising the amino acid sequence of SEQ ID NO: 1007, b. CDR-L2 comprising the amino acid sequence of SEQ ID NO: 1549, c. CDR-L3 comprising the amino acid sequence of SEQ ID NO: 2091, and a VH comprising the amino acid sequence of SEQ ID NO: 194.

[2384] In one aspect, an antibody or antigen-binding fragment thereof is provided, wherein the antibody or antigen-binding fragment thereof comprises a heavy chain variable domain (VH) having at least 90%, 91%, 92%, 93%, 94%, 95%, 96%, 97%, 98%, 99%, or 100% sequence identity to the amino acid sequence SEQ ID NO: 194. In some embodiments, a VH sequence having at least 90%, 91%, 92%, 93%, 94%, 95%, 96%, 97%, 98%, or 99% identity contains substitutions (e.g., conservative substitutions), insertions, or deletions relative to the reference sequence, but an antibody or antigen-binding fragment thereof comprising that sequence retains the ability to bind to same antigen as of the parent (e.g., cancer associated antigen). In some embodiments, a total of 1 to 10 amino acids have been substituted, inserted and/or deleted in the amino acid sequence SEQ ID NO: 194. In some embodiments, substitutions, insertions, or deletions occur in regions outside the CDRs (e.g., in the FRs). Optionally, the antibody or antigen-binding fragment thereof comprises the VH sequence SEQ ID NO: 194, including one or more post-translational modifications of that sequence. In a particular embodiment, the VH comprises one, two or three CDRs selected from: a. CDR-H1, comprising the amino acid sequence SEQ ID NO: 736, b. CDR-H2, comprising the amino acid sequence SEQ ID NO: 1278, and c. CDR-H3, comprising the amino acid sequence SEQ ID NO: 1820.

[2385] In one aspect, an antibody or antigen-binding fragment thereof is provided, wherein the antibody or antigen-binding fragment thereof comprises a light chain variable domain (VL) having at least 90%, 91%, 92%, 93%, 94%, 95%, 96%, 97%, 98%, 99%, or 100% sequence identity to the amino acid sequence SEQ ID NO: 465. In some embodiments, a VL sequence having at least 90%, 91%, 92%, 93%, 94%, 95%, 96%, 97%, 98%, or 99% identity contains substitutions (e.g., conservative substitutions), insertions, or deletions relative to the reference sequence, but an antibody or antigen-binding fragment thereof comprising that sequence retains the ability to bind to same antigen as the parent (e.g., cancer associated antigen). In some embodiments, a total of 1 to 10 amino acids have been substituted, inserted and/or deleted in the amino acid sequence SEQ ID NO: 465. In some embodiments, the substitutions, insertions, or deletions occur in regions outside the CDRs (e.g., in the FRs). Optionally, the antibody or antigen-binding fragment thereof comprises the VL sequence SEQ ID NO: 465, including one or more post-translational modifications of that sequence. In a particular embodiment, the VL comprises one, two or three CDRs selected from: a. CDR-L1, comprising the amino acid sequence SEQ ID NO: 1007, b. CDR-L2, comprising the amino acid sequence SEQ ID NO: 1549, and c. CDR-L3, comprising the amino acid sequence SEQ ID NO: 2091.

[2386] In one aspect, an antibody or antigen-binding fragment thereof is provided, wherein the antibody or antigen-binding fragment thereof comprises a VH as in any of the embodiments provided above, and a VL as in any of the embodiments provided above. In some embodiments, the antibody or antigen-binding fragment thereof comprises the VH amino acid sequence of SEQ ID NO: 194, and the VL amino acid sequence of SEQ ID NO: 465, optionally including post-translational modifications of those sequences.

### TMEL1040

[2387] In one aspect, the present disclosure provides an antibody or antigen-binding fragment thereof comprising at least one or both variable regions selected from: a. VH comprising the amino acid sequence of SEQ ID NO: 195 and b. VL comprising the amino acid sequence of SEQ ID NO: 466.

[2388] In one aspect, the present disclosure provides an antibody or antigen-binding fragment thereof comprising at least one, two, three, four, five, or six CDRs selected from: a. CDR-H1 comprising the amino acid sequence of SEQ ID NO: 737, b. CDR-H2 comprising the amino acid sequence of SEQ ID NO: 1279, c. CDR-H3 comprising the amino acid sequence of SEQ ID NO: 1821, d. CDR-L1 comprising the amino acid sequence of SEQ ID NO: 1008, e. CDR-L2 comprising the amino acid sequence of SEQ ID NO: 1550, and f. CDR-L3 comprising the amino acid sequence of SEQ ID NO: 2092.

[2389] In one aspect, the present disclosure provides an antibody or antigen-binding fragment thereof comprising a CDR-H3 comprising the amino acid sequence of SEQ ID NO: 1821, and a CDR-L3 comprising the amino acid sequence of SEQ ID NO: 2092.

[2390] In one aspect, the present disclosure provides an antibody or antigen-binding fragment thereof comprising at least one, at least two, or all three VH CDR sequences selected from: a. CDR-H1 comprising the amino acid sequence of SEQ ID NO: 737, b. CDR-H2 comprising the amino acid sequence of SEQ ID NO: 1279, c. CDR-H3 comprising the amino acid sequence of SEQ ID NO: 1821, and a VL comprising the amino acid sequence of SEQ ID NO: 466.

[2391] In one aspect, the present disclosure provides an antibody or antigen-binding fragment thereof comprising at least one, at least two, or all three VL CDR sequences selected from: a. CDR-L1 comprising the amino acid sequence of SEQ ID NO: 1008, b. CDR-L2 comprising the amino acid sequence of SEQ ID NO: 1550, c. CDR-L3 comprising the amino acid sequence of SEQ ID NO: 2092, and a VH comprising the amino acid sequence of SEQ ID NO: 195.

[2392] In one aspect, an antibody or antigen-binding fragment thereof is provided, wherein the antibody or antigen-binding fragment thereof comprises a heavy chain variable domain (VH) having at least 90%, 91%, 92%, 93%, 94%, 95%, 96%, 97%, 98%, 99%, or 100% sequence identity to the amino acid sequence SEQ ID NO: 195. In some embodiments, a VH sequence having at least 90%, 91%, 92%, 93%, 94%, 95%, 96%, 97%, 98%, or 99% identity contains substitutions (e.g., conservative substitutions), insertions, or deletions relative to the reference sequence, but an antibody or antigen-binding fragment thereof comprising that sequence retains the ability to bind to same antigen as of the parent (e.g., cancer associated antigen). In some embodiments, a total of 1 to 10 amino acids have been substituted, inserted and/or deleted in the amino acid sequence SEQ ID NO: 195. In some embodiments, substitutions, insertions, or deletions occur in regions outside the CDRs (e.g., in the FRs). Optionally, the antibody or antigen-binding fragment thereof comprises the VH sequence SEQ ID NO: 195, including one or more post-translational modifications of that sequence. In a particular embodiment, the VH comprises one, two or three CDRs selected from: a. CDR-H1, comprising the amino acid sequence SEQ ID NO: 737, b. CDR-H2, comprising the amino acid sequence SEQ ID NO: 1279, and c. CDR-H3, comprising the amino acid sequence SEQ ID NO: 1821.

[2393] In one aspect, an antibody or antigen-binding fragment thereof is provided, wherein the antibody or antigen-binding fragment thereof comprises a light chain variable domain (VL) having at least 90%, 91%, 92%, 93%, 94%, 95%, 96%, 97%, 98%, 99%, or 100% sequence identity to the amino acid sequence SEQ ID NO: 466. In some embodiments, a VL sequence having at least 90%, 91%, 92%, 93%, 94%, 95%, 96%, 97%, 98%, or 99% identity contains substitutions (e.g., conservative substitutions), insertions, or deletions relative to the reference sequence, but an antibody or antigen-binding fragment thereof comprising that sequence retains the ability to bind to same antigen as the parent (e.g., cancer associated antigen). In some embodiments, a total of 1 to 10 amino acids have been substituted, inserted and/or deleted in the amino acid sequence SEQ ID NO: 466. In some embodiments, the substitutions, insertions, or deletions occur in regions outside the CDRs (e.g., in the FRs). Optionally, the antibody or antigen-binding fragment thereof comprises the VL sequence SEQ ID NO: 466, including one or more post-translational modifications of that sequence. In a particular embodiment, the VL comprises one, two or three CDRs selected from: a. CDR-L1, comprising the amino acid sequence SEQ ID NO: 1008, b. CDR-L2, comprising the amino acid sequence SEQ ID NO: 1550, and c. CDR-L3, comprising the amino acid sequence SEQ ID NO: 2092.

[2394] In one aspect, an antibody or antigen-binding fragment thereof is provided, wherein the antibody or antigen-binding fragment thereof comprises a VH as in any of the embodiments provided above, and a VL as in any of the embodiments provided above. In some embodiments, the antibody or antigen-binding fragment thereof comprises the VH amino acid sequence of SEQ ID NO: 195, and the VL amino acid sequence of SEQ ID NO: 466, optionally including post-translational modifications of those sequences.

### TMEL1041

[2395] In one aspect, the present disclosure provides an antibody or antigen-binding fragment thereof comprising at least one or both variable regions selected from: a. VH comprising the amino acid sequence of SEQ ID NO: 196 and b. VL comprising the amino acid sequence of SEQ ID NO: 467.

[2396] In one aspect, the present disclosure provides an antibody or antigen-binding fragment thereof comprising at least one, two, three, four, five, or six CDRs selected from: a. CDR-H1 comprising the amino acid sequence of SEQ ID NO: 738, b. CDR-H2 comprising the amino acid sequence of SEQ ID NO: 1280, c. CDR-H3 comprising the amino acid sequence of SEQ ID NO: 1822, d. CDR-L1 comprising the amino acid sequence of SEQ ID NO: 1009, e. CDR-L2 comprising the amino acid sequence of SEQ ID NO: 1551, and f. CDR-L3 comprising the amino acid sequence of SEQ ID NO: 2093.

[2397] In one aspect, the present disclosure provides an antibody or antigen-binding fragment thereof comprising a CDR-H3 comprising the amino acid sequence of SEQ ID NO: 1822, and a CDR-L3 comprising the amino acid sequence of SEQ ID NO: 2093.

[2398] In one aspect, the present disclosure provides an antibody or antigen-binding fragment thereof comprising at least one, at least two, or all three VH CDR sequences selected from: a. CDR-H1 comprising the amino acid sequence of SEQ ID NO: 738, b. CDR-H2 comprising the amino acid sequence of SEQ ID NO: 1280, c. CDR-H3 comprising the amino acid sequence of SEQ ID NO: 1822, and a VL comprising the amino acid sequence of SEQ ID NO: 467.

[2399] In one aspect, the present disclosure provides an antibody or antigen-binding fragment thereof comprising at least one, at least two, or all three VL CDR sequences selected from: a. CDR-L1 comprising the amino acid sequence of SEQ ID NO: 1009, b. CDR-L2 comprising the amino acid sequence of SEQ ID NO: 1551, c. CDR-L3 comprising the amino acid sequence of SEQ ID NO: 2093, and a VH comprising the amino acid sequence of SEQ ID NO: 196.

[2400] In one aspect, an antibody or antigen-binding fragment thereof is provided, wherein the antibody or antigen-binding fragment thereof comprises a heavy chain variable domain (VH) having at least 90%, 91%, 92%, 93%, 94%, 95%, 96%, 97%, 98%, 99%, or 100% sequence identity to the amino acid sequence SEQ ID NO: 196. In some embodiments, a VH sequence having at least 90%, 91%, 92%, 93%, 94%, 95%, 96%, 97%, 98%, or 99% identity contains substitutions (e.g., conservative substitutions), insertions, or deletions relative to the reference sequence, but an antibody or antigen-binding fragment thereof comprising that sequence retains the ability to bind to same antigen as of the parent (e.g., cancer associated antigen). In some embodiments, a total of 1 to 10 amino acids have been substituted, inserted and/or deleted in the amino acid sequence SEQ ID NO: 196. In some embodiments, substitutions, insertions, or deletions occur in regions outside the CDRs (e.g., in the FRs). Optionally, the antibody or antigen-binding fragment thereof comprises the VH sequence SEQ ID NO: 196, including one or more post-translational modifications of that sequence. In a particular embodiment, the VH comprises one, two or three CDRs selected from: a. CDR-H1, comprising the amino acid sequence SEQ ID NO: 738, b. CDR-H2, comprising the amino acid sequence SEQ ID NO: 1280, and c. CDR-H3, comprising the amino acid sequence SEQ ID NO: 1822.

[2401] In one aspect, an antibody or antigen-binding fragment thereof is provided, wherein the antibody or antigen-binding fragment thereof comprises a light chain variable domain (VL) having at least 90%, 91%, 92%, 93%, 94%, 95%, 96%, 97%, 98%, 99%, or 100% sequence identity to the amino acid sequence SEQ ID NO: 467. In some embodiments, a VL sequence having at least 90%, 91%, 92%, 93%, 94%, 95%, 96%, 97%, 98%, or 99% identity contains substitutions (e.g., conservative substitutions), thereof comprising that sequence retains the ability to bind to same antigen as the parent (e.g., cancer associated antigen). In some embodiments, a total of 1 to 10 amino acids have been substituted, inserted and/or deleted in the amino acid sequence SEQ ID NO: 467. In some embodiments, the substitutions, insertions, or deletions occur in regions outside the CDRs (e.g., in the FRs). Optionally, the antibody or antigen-binding fragment thereof comprises the VL sequence SEQ ID NO: 467, including one or more post-translational modifications of that sequence. In a particular embodiment, the VL comprises one, two or three CDRs selected from: a. CDR-L1, comprising the amino acid sequence SEQ ID NO: 1009, b. CDR-L2, comprising the amino acid sequence SEQ ID NO: 1551, and a. CDR-L3, comprising the amino acid sequence SEQ ID NO: 2093.

[2402] In one aspect, an antibody or antigen-binding fragment thereof is provided, wherein the antibody or antigen-binding fragment thereof comprises a VH as in any of the embodiments provided above, and a VL as in any of the embodiments provided above. In some embodiments, the antibody or antigen-binding fragment thereof comprises the VH amino acid sequence of SEQ ID NO: 196, and the VL amino acid sequence of SEQ ID NO: 467, optionally including post-translational modifications of those sequences.

### TMES1001

[2403] In one aspect, the present disclosure provides an antibody or antigen-binding fragment thereof comprising at least one or both variable regions selected from: a. VH comprising the amino acid sequence of SEQ ID NO: 197 and b. VL comprising the amino acid sequence of SEQ ID NO: 468.

[2404] In one aspect, the present disclosure provides an antibody or antigen-binding fragment thereof comprising at least one, two, three, four, five, or six CDRs selected from: a. CDR-H1 comprising the amino acid sequence of SEQ ID NO: 739, b. CDR-H2 comprising the amino acid sequence of SEQ ID NO: 1281, c. CDR-H3 comprising the amino acid sequence of SEQ ID NO: 1823, d. CDR-L1 comprising the amino acid sequence of SEQ ID NO: 1010, e. CDR-L2 comprising the amino acid sequence of SEQ ID NO: 1552, and f. CDR-L3 comprising the amino acid sequence of SEQ ID NO: 2094.

[2405] In one aspect, the present disclosure provides an antibody or antigen-binding fragment thereof comprising a CDR-H3 comprising the amino acid sequence of SEQ ID NO: 1823 and a CDR-L3 comprising the amino acid sequence of SEQ ID NO: 2094.

[2406] In one aspect, the present disclosure provides an antibody or antigen-binding fragment thereof comprising at least one, at least two, or all three VH CDR sequences selected from: a. CDR-H1 comprising the amino acid sequence of SEQ ID NO: 739, b. CDR-H2 comprising the amino acid sequence of SEQ ID NO: 1281, c. CDR-H3 comprising the amino acid sequence of SEQ ID NO: 1823, and a VL comprising the amino acid sequence of SEQ ID NO: 468.

[2407] In one aspect, the present disclosure provides an antibody or antigen-binding fragment thereof comprising at least one, at least two, or all three VL CDR sequences selected from: a. CDR-L1 comprising the amino acid sequence of SEQ ID NO: 1010, b. CDR-L2 comprising the amino acid sequence of SEQ ID NO: 1552, c. CDR-L3 comprising the amino acid sequence of SEQ ID NO: 2094, and a VH comprising the amino acid sequence of SEQ ID NO: 197.

[2408] In one aspect, an antibody or antigen-binding fragment thereof is provided, wherein the antibody or antigen-binding fragment thereof comprises a heavy chain variable domain (VH) having at least 90%, 91%, 92%, 93%, 94%, 95%, 96%, 97%, 98%, 99%, or 100% sequence identity to the amino acid sequence SEQ ID NO: 197. In some embodiments, a VH sequence having at least 90%, 91%, 92%, 93%, 94%, 95%, 96%, 97%, 98%, or 99% identity contains substitutions (e.g., conservative substitutions), insertions, or deletions relative to the reference sequence, but an antibody or antigen-binding fragment thereof comprising that sequence retains the ability to bind to same antigen as of the parent (e.g., cancer associated antigen). In some embodiments, a total of 1 to 10 amino acids have been substituted, inserted and/or deleted in the amino acid sequence SEQ ID NO: 197. In some embodiments, substitutions, insertions, or deletions occur in regions outside the CDRs (e.g., in the FRs). Optionally, the antibody or antigen-binding fragment thereof comprises the VH sequence SEQ ID NO: 197, including one or more post-translational modifications of that sequence. In a particular embodiment, the VH comprises one, two or three CDRs selected from: a. CDR-H1, comprising the amino acid sequence SEQ ID NO: 739, b. CDR-H2, comprising the amino acid sequence SEQ ID NO: 1281, and c. CDR-H3, comprising the amino acid sequence SEQ ID NO: 1823.

[2409] In one aspect, an antibody or antigen-binding fragment thereof is provided, wherein the antibody or antigen-binding fragment thereof comprises a light chain variable domain (VL) having at least 90%, 91%, 92%, 93%, 94%, 95%, 96%, 97%, 98%, 99%, or 100% sequence identity to the amino acid sequence SEQ ID NO: 468. In some embodiments, a VL sequence having at least 90%, 91%, 92%, 93%, 94%, 95%, 96%, 97%, 98%, or 99% identity contains substitutions (e.g., conservative substitutions), insertions, or deletions relative to the reference sequence, but an antibody or antigen-binding fragment thereof comprising that sequence retains the ability to bind to same antigen as the parent (e.g., cancer associated antigen). In some embodiments, a total of 1 to 10 amino acids have been substituted, inserted and/or deleted in the amino acid sequence SEQ ID NO: 468. In some embodiments, the substitutions, insertions, or deletions occur in regions outside the CDRs (e.g., in the FRs). Optionally, the antibody or antigen-binding fragment thereof comprises the VL sequence SEQ ID NO: 468, including one or more post-translational modifications of that sequence. In a particular embodiment, the VL comprises one, two or three CDRs selected from: a. CDR-L1, comprising the amino acid sequence SEQ ID NO: 1010, b. CDR-L2, comprising the amino acid sequence SEQ ID NO: 1552, and c. CDR-L3, comprising the amino acid sequence SEQ ID NO: 2094.

[2410] In one aspect, an antibody or antigen-binding fragment thereof is provided, wherein the antibody or antigen-binding fragment thereof comprises a VH as in any of the embodiments provided above, and a VL as in any of the embodiments provided above. In some embodiments, the antibody or antigen-binding fragment thereof comprises the VH amino acid sequence of SEQ ID NO: 197, and the VL amino acid sequence of SEQ ID NO: 468, optionally including post-translational modifications of those sequences.

### TMES1002

[2411] In one aspect, the present disclosure provides an antibody or antigen-binding fragment thereof comprising at least one or both variable regions selected from: a. VH comprising the amino acid sequence of SEQ ID NO: 198 and b. VL comprising the amino acid sequence of SEQ ID NO: 469.

[2412] In one aspect, the present disclosure provides an antibody or antigen-binding fragment thereof comprising at least one, two, three, four, five, or six CDRs selected from: a. CDR-H1 comprising the amino acid sequence of SEQ ID NO: 740, b. CDR-H2 comprising the amino acid sequence of SEQ ID NO: 1282, c. CDR-H3 comprising the amino acid sequence of SEQ ID NO: 1824, d. CDR-L1 comprising the amino acid sequence of SEQ ID NO: 1011, e. CDR-L2 comprising the amino acid sequence of SEQ ID NO: 1553, and f. CDR-L3 comprising the amino acid sequence of SEQ ID NO: 2095.

[2413] In one aspect, the present disclosure provides an antibody or antigen-binding fragment thereof comprising a CDR-H3 comprising the amino acid sequence of SEQ ID NO: 1824, and a CDR-L3 comprising the amino acid sequence of SEQ ID NO: 2095.

[2414] In one aspect, the present disclosure provides an antibody or antigen-binding fragment thereof comprising at least one, at least two, or all three VH CDR sequences selected from: a. CDR-H1 comprising the amino acid sequence of SEQ ID NO: 740, b. CDR-H2 comprising the amino acid sequence of SEQ ID NO: 1282, c. CDR-H3 comprising the amino acid sequence of SEQ ID NO: 1824, and a VL comprising the amino acid sequence of SEQ ID NO: 469.

[2415] In one aspect, the present disclosure provides an antibody or antigen-binding fragment thereof comprising at least one, at least two, or all three VL CDR sequences selected from: a. CDR-L1 comprising the amino acid sequence of SEQ ID NO: 1011, b. CDR-L2 comprising the amino acid sequence of SEQ ID NO: 1553, c. CDR-L3 comprising the amino acid sequence of SEQ ID NO: 2095, and a VH comprising the amino acid sequence of SEQ ID NO: 198.

[2416] In one aspect, an antibody or antigen-binding fragment thereof is provided, wherein the antibody or antigen-binding fragment thereof comprises a heavy chain variable domain (VH) having at least 90%, 91%, 92%, 93%, 94%, 95%, 96%, 97%, 98%, 99%, or 100% sequence identity to the amino acid sequence SEQ ID NO: 198. In some embodiments, a VH sequence having at least 90%, 91%, 92%, 93%, 94%, 95%, 96%, 97%, 98%, or 99% identity contains substitutions (e.g., conservative substitutions), insertions, or deletions relative to the reference sequence, but an antibody or antigen-binding fragment thereof comprising that sequence retains the ability to bind to same antigen as of the parent (e.g., cancer associated antigen). In some embodiments, a total of 1 to 10 amino acids have been substituted, inserted and/or deleted in the amino acid sequence SEQ ID NO: 198. In some embodiments, substitutions, insertions, or deletions occur in regions outside the CDRs (e.g., in the FRs). Optionally, the antibody or antigen-binding fragment thereof comprises the VH sequence SEQ ID NO: 198, including one or more post-translational modifications of that sequence. In a particular embodiment, the VH comprises one, two or three CDRs selected from: a. CDR-H1, comprising the amino acid sequence SEQ ID NO: 740, b. CDR-H2, comprising the amino acid sequence SEQ ID NO: 1282, and c. CDR-H3, comprising the amino acid sequence SEQ ID NO: 1824.

[2417] In one aspect, an antibody or antigen-binding fragment thereof is provided, wherein the antibody or antigen-binding fragment thereof comprises a light chain variable domain (VL) having at least 90%, 91%, 92%, 93%, 94%, 95%, 96%, 97%, 98%, 99%, or 100% sequence identity to the amino acid sequence SEQ ID NO: 469. In some embodiments, a VL sequence having at least 90%, 91%, 92%, 93%, 94%, 95%, 96%, 97%, 98%, or 99% identity contains substitutions (e.g., conservative substitutions), insertions, or deletions relative to the reference sequence, but an antibody or antigen-binding fragment thereof comprising that sequence retains the ability to bind to same antigen as the parent (e.g., cancer associated antigen). In some embodiments, a total of 1 to 10 amino acids have been substituted, inserted and/or deleted in the amino acid sequence SEQ ID NO: 469. In some embodiments, the substitutions, insertions, or deletions occur in regions outside the CDRs (e.g., in the FRs). Optionally, the antibody or antigen-binding fragment thereof comprises the VL sequence SEQ ID NO: 469, including one or more post-translational modifications of that sequence. In a particular embodiment, the VL comprises one, two or three CDRs selected from: a. CDR-L1, comprising the amino acid sequence SEQ ID NO: 1011, b. CDR-L2, comprising the amino acid sequence SEQ ID NO: 1553, and c. CDR-L3, comprising the amino acid sequence SEQ ID NO: 2095.

[2418] In one aspect, an antibody or antigen-binding fragment thereof is provided, wherein the antibody or antigen-binding fragment thereof comprises a VH as in any of the embodiments provided above, and a VL as in any of the embodiments provided above. In some embodiments, the antibody or antigen-binding fragment thereof comprises the VH amino acid sequence of SEQ ID NO: 198, and the VL amino acid sequence of SEQ ID NO: 469, optionally including post-translational modifications of those sequences.

### TMES1003

[2419] In one aspect, the present disclosure provides an antibody or antigen-binding fragment thereof comprising at least one or both variable regions selected from: a. VH comprising the amino acid sequence of SEQ ID NO: 199 and b. VL comprising the amino acid sequence of SEQ ID NO: 470.

[2420] In one aspect, the present disclosure provides an antibody or antigen-binding fragment thereof comprising at least one, two, three, four, five, or six CDRs selected from: a. CDR-H1 comprising the amino acid sequence of SEQ ID NO: 741, b. CDR-H2 comprising the amino acid sequence of SEQ ID NO: 1283, c. CDR-H3 comprising the amino acid sequence of SEQ ID NO: 1825, d. CDR-L1 comprising the amino acid sequence of SEQ ID NO: 1012, e. CDR-L2 comprising the amino acid sequence of SEQ ID NO: 1554, and f. CDR-L3 comprising the amino acid sequence of SEQ ID NO: 2096.

[2421] In one aspect, the present disclosure provides an antibody or antigen-binding fragment thereof comprising a CDR-H3 comprising the amino acid sequence of SEQ ID NO: 1825, and a CDR-L3 comprising the amino acid sequence of SEQ ID NO: 2096.

[2422] In one aspect, the present disclosure provides an antibody or antigen-binding fragment thereof comprising at least one, at least two, or all three VH CDR sequences selected from: a. CDR-H1 comprising the amino acid sequence of SEQ ID NO: 741, b. CDR-H2 comprising the amino acid sequence of SEQ ID NO: 1283, c. CDR-H3 comprising the amino acid sequence of SEQ ID NO: 1825, and a VL comprising the amino acid sequence of SEQ ID NO: 470.

[2423] In one aspect, the present disclosure provides an antibody or antigen-binding fragment thereof comprising at least one, at least two, or all three VL CDR sequences selected from: a. CDR-L1 comprising the amino acid sequence of SEQ ID NO: 1012, b. CDR-L2 comprising the amino acid sequence of SEQ ID NO: 1554, c. CDR-L3 comprising the amino acid sequence of SEQ ID NO: 2096, and a VH comprising the amino acid sequence of SEQ ID NO: 199.

[2424] In one aspect, an antibody or antigen-binding fragment thereof is provided, wherein the antibody or antigen-binding fragment thereof comprises a heavy chain variable domain (VH) having at least 90%, 91%, 92%, 93%, 94%, 95%, 96%, 97%, 98%, 99%, or 100% sequence identity to the amino acid sequence SEQ ID NO: 199. In some embodiments, a VH sequence having at least 90%, 91%, 92%, 93%, 94%, 95%, 96%, 97%, 98%, or 99% identity contains substitutions (e.g., conservative substitutions), insertions, or deletions relative to the reference sequence, but an antibody or antigen-binding fragment thereof comprising that sequence retains the ability to bind to same antigen as of the parent (e.g., cancer associated antigen). In some embodiments, a total of 1 to 10 amino acids have been substituted, inserted and/or deleted in the amino acid sequence SEQ ID NO: 199. In some embodiments, substitutions, insertions, or deletions occur in regions outside the CDRs (e.g., in the FRs). Optionally, the antibody or antigen-binding fragment thereof comprises the VH sequence SEQ ID NO: 199, including one or more post-translational modifications of that sequence. In a particular embodiment, the VH comprises one, two or three CDRs selected from: a. CDR-H1, comprising the amino acid sequence SEQ ID NO: 741, b. CDR-H2, comprising the amino acid sequence SEQ ID NO: 1283, and c. CDR-H3, comprising the amino acid sequence SEQ ID NO: 1825.

[2425] In one aspect, an antibody or antigen-binding fragment thereof is provided, wherein the antibody or antigen-binding fragment thereof comprises a light chain variable domain (VL) having at least 90%, 91%, 92%, 93%, 94%, 95%, 96%, 97%, 98%, 99%, or 100% sequence identity to the amino acid sequence SEQ ID NO: 470. In some embodiments, a VL sequence having at least 90%, 91%, 92%, 93%, 94%, 95%, 96%, 97%, 98%, or 99% identity contains substitutions (e.g., conservative substitutions), insertions, or deletions relative to the reference sequence, but an antibody or antigen-binding fragment thereof comprising that sequence retains the ability to bind to same antigen as the parent (e.g., cancer associated antigen). In some embodiments, a total of 1 to 10 amino acids have been substituted, inserted and/or deleted in the amino acid sequence SEQ ID NO: 470. In some embodiments, the substitutions, insertions, or deletions occur in regions outside the CDRs (e.g., in the FRs). Optionally, the antibody or antigen-binding fragment thereof comprises the VL sequence SEQ ID NO: 470, including one or more post-translational modifications of that sequence. In a particular embodiment, the VL comprises one, two or three CDRs selected from: a. CDR-L1, comprising the amino acid sequence SEQ ID NO: 1012, b. CDR-L2, comprising the amino acid sequence SEQ ID NO: 1554, and c. CDR-L3, comprising the amino acid sequence SEQ ID NO: 2096.

[2426] In one aspect, an antibody or antigen-binding fragment thereof is provided, wherein the antibody or antigen-binding fragment thereof comprises a VH as in any of the embodiments provided above, and a VL as in any of the embodiments provided above. In some embodiments, the antibody or antigen-binding fragment thereof comprises the VH amino acid sequence of SEQ ID NO: 199, and the VL amino acid sequence of SEQ ID NO: 470, optionally including post-translational modifications of those sequences.

### TMES1004

[2427] In one aspect, the present disclosure provides an antibody or antigen-binding fragment thereof comprising at least one or both variable regions selected from: a. VH comprising the amino acid sequence of SEQ ID NO: 200 and b. VL comprising the amino acid sequence of SEQ ID NO: 471.

[2428] In one aspect, the present disclosure provides an antibody or antigen-binding fragment thereof comprising at least one, two, three, four, five, or six CDRs selected from: a. CDR-H1 comprising the amino acid sequence of SEQ ID NO: 742, b. CDR-H2 comprising the amino acid sequence of SEQ ID NO: 1284, c. CDR-H3 comprising the amino acid sequence of SEQ ID NO: 1826, d. CDR-L1 comprising the amino acid sequence of SEQ ID NO: 1013, e. CDR-L2 comprising the amino acid sequence of SEQ ID NO: 1555, and f. CDR-L3 comprising the amino acid sequence of SEQ ID NO: 2097.

[2429] In one aspect, the present disclosure provides an antibody or antigen-binding fragment thereof comprising a CDR-H3 comprising the amino acid sequence of SEQ ID NO: 1826, and a CDR-L3 comprising the amino acid sequence of SEQ ID NO: 2097.

[2430] In one aspect, the present disclosure provides an antibody or antigen-binding fragment thereof comprising at least one, at least two, or all three VH CDR sequences selected from: a. CDR-H1 comprising the amino acid sequence of SEQ ID NO: 742, b. CDR-H2 comprising the amino acid sequence of SEQ ID NO: 1284, c. CDR-H3 comprising the amino acid sequence of SEQ ID NO: 1826, and a VL comprising the amino acid sequence of SEQ ID NO: 471.

[2431] In one aspect, the present disclosure provides an antibody or antigen-binding fragment thereof comprising at least one, at least two, or all three VL CDR sequences selected from: a. CDR-L1 comprising the amino acid sequence of SEQ ID NO: 1013, b. CDR-L2 comprising the amino acid sequence of SEQ ID NO: 1555, c. CDR-L3 comprising the amino acid sequence of SEQ ID NO: 2097, and a VH comprising the amino acid sequence of SEQ ID NO: 200.

[2432] In one aspect, an antibody or antigen-binding fragment thereof is provided, wherein the antibody or antigen-binding fragment thereof comprises a heavy chain variable domain (VH) having at least 90%, 91%, 92%, 93%, 94%, 95%, 96%, 97%, 98%, 99%, or 100% sequence identity to the amino acid sequence SEQ ID NO: 200. In some embodiments, a VH sequence having at least 90%, 91%, 92%, 93%, 94%, 95%, 96%, 97%, 98%, or 99% identity contains substitutions (e.g., conservative substitutions), insertions, or deletions relative to the reference sequence, but an antibody or antigen-binding fragment thereof comprising that sequence retains the ability to bind to same antigen as of the parent (e.g., cancer associated antigen). In some embodiments, a total of 1 to 10 amino acids have been substituted, inserted and/or deleted in the amino acid sequence SEQ ID NO: 200. In some embodiments, substitutions, insertions, or deletions occur in regions outside the CDRs (e.g., in the FRs). Optionally, the antibody or antigen-binding fragment thereof comprises the VH sequence SEQ ID NO: 200, including one or more post-translational modifications of that sequence. In a particular embodiment, the VH comprises one, two or three CDRs selected from: a. CDR-H1, comprising the amino acid sequence SEQ ID NO: 742, b. CDR-H2, comprising the amino acid sequence SEQ ID NO: 1284, and c. CDR-H3, comprising the amino acid sequence SEQ ID NO: 1826.

[2433] In one aspect, an antibody or antigen-binding fragment thereof is provided, wherein the antibody or antigen-binding fragment thereof comprises a light chain variable domain (VL) having at least 90%, 91%, 92%, 93%, 94%, 95%, 96%, 97%, 98%, 99%, or 100% sequence identity to the amino acid sequence SEQ ID NO: 471. In some embodiments, a VL sequence having at least 90%, 91%, 92%, 93%, 94%, 95%, 96%, 97%, 98%, or 99% identity contains substitutions (e.g., conservative substitutions), insertions, or deletions relative to the reference sequence, but an antibody or antigen-binding fragment thereof comprising that sequence retains the ability to bind to same antigen as the parent (e.g., cancer associated antigen). In some embodiments, a total of 1 to 10 amino acids have been substituted, inserted and/or deleted in the amino acid sequence SEQ ID NO: 471. In some embodiments, the substitutions, insertions, or deletions occur in regions outside the CDRs (e.g., in the FRs). Optionally, the antibody or antigen-binding fragment thereof comprises the VL sequence SEQ ID NO: 471, including one or more post-translational modifications of that sequence. In a particular embodiment, the VL comprises one, two or three CDRs selected from: a. CDR-L1, comprising the amino acid sequence SEQ ID NO: 1013, b. CDR-L2, comprising the amino acid sequence SEQ ID NO: 1555, and c. CDR-L3, comprising the amino acid sequence SEQ ID NO: 2097.

[2434] In one aspect, an antibody or antigen-binding fragment thereof is provided, wherein the antibody or antigen-binding fragment thereof comprises a VH as in any of the embodiments provided above, and a VL as in any of the embodiments provided above. In some embodiments, the antibody or antigen-binding fragment thereof comprises the VH amino acid sequence of SEQ ID NO: 200, and the VL amino acid sequence of SEQ ID NO: 471, optionally including post-translational modifications of those sequences.

### TOVA1001

[2435] In one aspect, the present disclosure provides an antibody or antigen-binding fragment thereof comprising at least one or both variable regions selected from: a. VH comprising the amino acid sequence of SEQ ID NO: 201 and b. VL comprising the amino acid sequence of SEQ ID NO: 472.

[2436] In one aspect, the present disclosure provides an antibody or antigen-binding fragment thereof comprising at least one, two, three, four, five, or six CDRs selected from: a. CDR-H1 comprising the amino acid sequence of SEQ ID NO: 743, b. CDR-H2 comprising the amino acid sequence of SEQ ID NO: 1285, c. CDR-H3 comprising the amino acid sequence of SEQ ID NO: 1827, d. CDR-L1 comprising the amino acid sequence of SEQ ID NO: 1014, e. CDR-L2 comprising the amino acid sequence of SEQ ID NO: 1556, and f. CDR-L3 comprising the amino acid sequence of SEQ ID NO: 2098.

[2437] In one aspect, the present disclosure provides an antibody or antigen-binding fragment thereof comprising a CDR-H3 comprising the amino acid sequence of SEQ ID NO: 1827, and a CDR-L3 comprising the amino acid sequence of SEQ ID NO: 2098.

[2438] In one aspect, the present disclosure provides an antibody or antigen-binding fragment thereof comprising at least one, at least two, or all three VH CDR sequences selected from: a. CDR-H1 comprising the amino acid sequence of SEQ ID NO: 743, b. CDR-H2 comprising the amino acid sequence of SEQ ID NO: 1285, c. CDR-H3 comprising the amino acid sequence of SEQ ID NO: 1827, and a VL comprising the amino acid sequence of SEQ ID NO: 472.

[2439] In one aspect, the present disclosure provides an antibody or antigen-binding fragment thereof comprising at least one, at least two, or all three VL CDR sequences selected from: a. CDR-L1 comprising the amino acid sequence of SEQ ID NO: 1014, b. CDR-L2 comprising the amino acid sequence of SEQ ID NO: 1556, c. CDR-L3 comprising the amino acid sequence of SEQ ID NO: 2098, and a VH comprising the amino acid sequence of SEQ ID NO: 201.

[2440] In one aspect, an antibody or antigen-binding fragment thereof is provided, wherein the antibody or antigen-binding fragment thereof comprises a heavy chain variable domain (VH) having at least 90%, 91%, 92%, 93%, 94%, 95%, 96%, 97%, 98%, 99%, or 100% sequence identity to the amino acid sequence SEQ ID NO: 201. In some embodiments, a VH sequence having at least 90%, 91%, 92%, 93%, 94%, 95%, 96%, 97%, 98%, or 99% identity contains substitutions (e.g., conservative substitutions), insertions, or deletions relative to the reference sequence, but an antibody or antigen-binding fragment thereof comprising that sequence retains the ability to bind to same antigen as of the parent (e.g., cancer associated antigen). In some embodiments, a total of 1 to 10 amino acids have been substituted, inserted and/or deleted in the amino acid sequence SEQ ID NO: 201. In some embodiments, substitutions, insertions, or deletions occur in regions outside the CDRs (e.g., in the FRs). Optionally, the antibody or antigen-binding fragment thereof comprises the VH sequence SEQ ID NO: 201, including one or more post-translational modifications of that sequence. In a particular embodiment, the VH comprises one, two or three CDRs selected from: a. CDR-H1, comprising the amino acid sequence SEQ ID NO: 743, b. CDR-H2, comprising the amino acid sequence SEQ ID NO: 1285, and c. CDR-H3, comprising the amino acid sequence SEQ ID NO: 1827.

[2441] In one aspect, an antibody or antigen-binding fragment thereof is provided, wherein the antibody or antigen-binding fragment thereof comprises a light chain variable domain (VL) having at least 90%, 91%, 92%, 93%, 94%, 95%, 96%, 97%, 98%, 99%, or 100% sequence identity to the amino acid sequence SEQ ID NO: 472. In some embodiments, a VL sequence having at least 90%, 91%, 92%, 93%, 94%, 95%, 96%, 97%, 98%, or 99% identity contains substitutions (e.g., conservative substitutions), insertions, or deletions relative to the reference sequence, but an antibody or antigen-binding fragment thereof comprising that sequence retains the ability to bind to same antigen as the parent (e.g., cancer associated antigen). In some embodiments, a total of 1 to 10 amino acids have been substituted, inserted and/or deleted in the amino acid sequence SEQ ID NO: 472. In some embodiments, the substitutions, insertions, or deletions occur in regions outside the CDRs (e.g., in the FRs). Optionally, the antibody or antigen-binding fragment thereof comprises the VL sequence SEQ ID NO: 472, including one or more post-translational modifications of that sequence. In a particular embodiment, the VL comprises one, two or three CDRs selected from: a. CDR-L1, comprising the amino acid sequence SEQ ID NO: 1014, b. CDR-L2, comprising the amino acid sequence SEQ ID NO: 1556, and c. CDR-L3, comprising the amino acid sequence SEQ ID NO: 2098.

[2442] In one aspect, an antibody or antigen-binding fragment thereof is provided, wherein the antibody or antigen-binding fragment thereof comprises a VH as in any of the embodiments provided above, and a VL as in any of the embodiments provided above. In some embodiments, the antibody or antigen-binding fragment thereof comprises the VH amino acid sequence of SEQ ID NO: 201, and the VL amino acid sequence of SEQ ID NO: 472, optionally including post-translational modifications of those sequences.

### TOVA1002

[2443] In one aspect, the present disclosure provides an antibody or antigen-binding fragment thereof comprising at least one or both variable regions selected from: a. VH comprising the amino acid sequence of SEQ ID NO: 202 and b. VL comprising the amino acid sequence of SEQ ID NO: 473.

[2444] In one aspect, the present disclosure provides an antibody or antigen-binding fragment thereof comprising at least one, two, three, four, five, or six CDRs selected from: a. CDR-H1 comprising the amino acid sequence of SEQ ID NO: 744, b. CDR-H2 comprising the amino acid sequence of SEQ ID NO: 1286, c. CDR-H3 comprising the amino acid sequence of SEQ ID NO: 1828, d. CDR-L1 comprising the amino acid sequence of SEQ ID NO: 1015, e. CDR-L2 comprising the amino acid sequence of SEQ ID NO: 1557, and f. CDR-L3 comprising the amino acid sequence of SEQ ID NO: 2099.

[2445] In one aspect, the present disclosure provides an antibody or antigen-binding fragment thereof comprising a CDR-H3 comprising the amino acid sequence of SEQ ID NO: 1828, and a CDR-L3 comprising the amino acid sequence of SEQ ID NO: 2099.

[2446] In one aspect, the present disclosure provides an antibody or antigen-binding fragment thereof comprising at least one, at least two, or all three VH CDR sequences selected from: a. CDR-H1 comprising the amino acid sequence of SEQ ID NO: 744, b. CDR-H2 comprising the amino acid sequence of SEQ ID NO: 1286, c. CDR-H3 comprising the amino acid sequence of SEQ ID NO: 1828, and a VL comprising the amino acid sequence of SEQ ID NO: 473.

[2447] In one aspect, the present disclosure provides an antibody or antigen-binding fragment thereof comprising at least one, at least two, or all three VL CDR sequences selected from: a. CDR-L1 comprising the amino acid sequence of SEQ ID NO: 1015, b. CDR-L2 comprising the amino acid sequence of SEQ ID NO: 1557, c. CDR-L3 comprising the amino acid sequence of SEQ ID NO: 2099, and a VH comprising the amino acid sequence of SEQ ID NO: 202.

[2448] In one aspect, an antibody or antigen-binding fragment thereof is provided, wherein the antibody or antigen-binding fragment thereof comprises a heavy chain variable domain (VH) having at least 90%, 91%, 92%, 93%, 94%, 95%, 96%, 97%, 98%, 99%, or 100% sequence identity to the amino acid sequence SEQ ID NO: 202. In some embodiments, a VH sequence having at least 90%, 91%, 92%, 93%, 94%, 95%, 96%, 97%, 98%, or 99% identity contains substitutions (e.g., conservative substitutions), insertions, or deletions relative to the reference sequence, but an antibody or antigen-binding fragment thereof comprising that sequence retains the ability to bind to same antigen as of the parent (e.g., cancer associated antigen). In some embodiments, a total of 1 to 10 amino acids have been substituted, inserted and/or deleted in the amino acid sequence SEQ ID NO: 202. In some embodiments, substitutions, antigen-binding fragment thereof comprises the VH sequence SEQ ID NO: 202, including one or more post-translational modifications of that sequence. In a particular embodiment, the VH comprises one, two or three CDRs selected from: a. CDR-H1, comprising the amino acid sequence SEQ ID NO: 744, b. CDR-H2, comprising the amino acid sequence SEQ ID NO: 1286, and c. CDR-H3, comprising the amino acid sequence SEQ ID NO: 1828.

[2449] In one aspect, an antibody or antigen-binding fragment thereof is provided, wherein the antibody or antigen-binding fragment thereof comprises a light chain variable domain (VL) having at least 90%, 91%, 92%, 93%, 94%, 95%, 96%, 97%, 98%, 99%, or 100% sequence identity to the amino acid sequence SEQ ID NO: 473. In some embodiments, a VL sequence having at least 90%, 91%, 92%, 93%, 94%, 95%, 96%, 97%, 98%, or 99% identity contains substitutions (e.g., conservative substitutions), insertions, or deletions relative to the reference sequence, but an antibody or antigen-binding fragment thereof comprising that sequence retains the ability to bind to same antigen as the parent (e.g., cancer associated antigen). In some embodiments, a total of 1 to 10 amino acids have been substituted, inserted and/or deleted in the amino acid sequence SEQ ID NO: 473. In some embodiments, the substitutions, insertions, or deletions occur in regions outside the CDRs (e.g., in the FRs). Optionally, the antibody or antigen-binding fragment thereof comprises the VL sequence SEQ ID NO: 473, including one or more post-translational modifications of that sequence. In a particular embodiment, the VL comprises one, two or three CDRs selected from: a. CDR-L1, comprising the amino acid sequence SEQ ID NO: 1015, b. CDR-L2, comprising the amino acid sequence SEQ ID NO: 1557, and c. CDR-L3, comprising the amino acid sequence SEQ ID NO: 2099.

[2450] In one aspect, an antibody or antigen-binding fragment thereof is provided, wherein the antibody or antigen-binding fragment thereof comprises a VH as in any of the embodiments provided above, and a VL as in any of the embodiments provided above. In some embodiments, the antibody or antigen-binding fragment thereof comprises the VH amino acid sequence of SEQ ID NO: 202, and the VL amino acid sequence of SEQ ID NO: 473, optionally including post-translational modifications of those sequences.

### TOVA1003

[2451] In one aspect, the present disclosure provides an antibody or antigen-binding fragment thereof comprising at least one or both variable regions selected from: a. VH comprising the amino acid sequence of SEQ ID NO: 203 and b. VL comprising the amino acid sequence of SEQ ID NO: 474.

[2452] In one aspect, the present disclosure provides an antibody or antigen-binding fragment thereof comprising at least one, two, three, four, five, or six CDRs selected from: a. CDR-H1 comprising the amino acid sequence of SEQ ID NO: 745, b. CDR-H2 comprising the amino acid sequence of SEQ ID NO: 1287, c. CDR-H3 comprising the amino acid sequence of SEQ ID NO: 1829, d. CDR-L1 comprising the amino acid sequence of SEQ ID NO: 1016, e. CDR-L2 comprising the amino acid sequence of SEQ ID NO: 1558, and f. CDR-L3 comprising the amino acid sequence of SEQ ID NO: 2100.

[2453] In one aspect, the present disclosure provides an antibody or antigen-binding fragment thereof comprising a CDR-H3 comprising the amino acid sequence of SEQ ID NO: 1829, and a CDR-L3 comprising the amino acid sequence of SEQ ID NO: 2100.

[2454] In one aspect, the present disclosure provides an antibody or antigen-binding fragment thereof comprising at least one, at least two, or all three VH CDR sequences selected from: a. CDR-H1 comprising the amino acid sequence of SEQ ID NO: 745, b. CDR-H2 comprising the amino acid sequence of SEQ ID NO: 1287, c. CDR-H3 comprising the amino acid sequence of SEQ ID NO: 1829, and a VL comprising the amino acid sequence of SEQ ID NO: 474.

[2455] In one aspect, the present disclosure provides an antibody or antigen-binding fragment thereof comprising at least one, at least two, or all three VL CDR sequences selected from: a. CDR-L1 comprising the amino acid sequence of SEQ ID NO: 1016, b. CDR-L2 comprising the amino acid sequence of SEQ ID NO: 1558, c. CDR-L3 comprising the amino acid sequence of SEQ ID NO: 2100, and a VH comprising the amino acid sequence of SEQ ID NO: 203.

[2456] In one aspect, an antibody or antigen-binding fragment thereof is provided, wherein the antibody or antigen-binding fragment thereof comprises a heavy chain variable domain (VH) having at least 90%, 91%, 92%, 93%, 94%, 95%, 96%, 97%, 98%, 99%, or 100% sequence identity to the amino acid sequence SEQ ID NO: 203. In some embodiments, a VH sequence having at least 90%, 91%, 92%, 93%, 94%, 95%, 96%, 97%, 98%, or 99% identity contains substitutions (e.g., conservative substitutions), insertions, or deletions relative to the reference sequence, but an antibody or antigen-binding fragment thereof comprising that sequence retains the ability to bind to same antigen as of the parent (e.g., cancer associated antigen). In some embodiments, a total of 1 to 10 amino acids have been substituted, inserted and/or deleted in the amino acid sequence SEQ ID NO: 203. In some embodiments, substitutions, insertions, or deletions occur in regions outside the CDRs (e.g., in the FRs). Optionally, the antibody or antigen-binding fragment thereof comprises the VH sequence SEQ ID NO: 203, including one or more post-translational modifications of that sequence. In a particular embodiment, the VH comprises one, two or three CDRs selected from: a. CDR-H1, comprising the amino acid sequence SEQ ID NO: 745, b. CDR-H2, comprising the amino acid sequence SEQ ID NO: 1287, and c. CDR-H3, comprising the amino acid sequence SEQ ID NO: 1829.

[2457] In one aspect, an antibody or antigen-binding fragment thereof is provided, wherein the antibody or antigen-binding fragment thereof comprises a light chain variable domain (VL) having at least 90%, 91%, 92%, 93%, 94%, 95%, 96%, 97%, 98%, 99%, or 100% sequence identity to the amino acid sequence SEQ ID NO: 474. In some embodiments, a VL sequence having at least 90%, 91%, 92%, 93%, 94%, 95%, 96%, 97%, 98%, or 99% identity contains substitutions (e.g., conservative substitutions), insertions, or deletions relative to the reference sequence, but an antibody or antigen-binding fragment thereof comprising that sequence retains the ability to bind to same antigen as the parent (e.g., cancer associated antigen). In some embodiments, a total of 1 to 10 amino acids have been substituted, inserted and/or deleted in the amino acid sequence SEQ ID NO: 474. In some embodiments, the substitutions, insertions, or deletions occur in regions outside the CDRs (e.g., in the FRs). Optionally, the antibody or antigen-binding fragment thereof comprises the VL sequence SEQ ID NO: 474, including one or more post-translational modifications of that sequence. In a particular embodiment, the VL comprises one, two or three CDRs selected from: a. CDR-L1, comprising the amino acid sequence SEQ ID NO: 1016, b. CDR-L2, comprising the amino acid sequence SEQ ID NO: 1558, and c. CDR-L3, comprising the amino acid sequence SEQ ID NO: 2100.

[2458] In one aspect, an antibody or antigen-binding fragment thereof is provided, wherein the antibody or antigen-binding fragment thereof comprises a VH as in any of the embodiments provided above, and a VL as in any of the embodiments provided above. In some embodiments, the antibody or antigen-binding fragment thereof comprises the VH amino acid sequence of SEQ ID NO: 203, and the VL amino acid sequence of SEQ ID NO: 474, optionally including post-translational modifications of those sequences.

### TOVA1004

[2459] In one aspect, the present disclosure provides an antibody or antigen-binding fragment thereof comprising at least one or both variable regions selected from: a. VH comprising the amino acid sequence of SEQ ID NO: 204 and b. VL comprising the amino acid sequence of SEQ ID NO: 475.

[2460] In one aspect, the present disclosure provides an antibody or antigen-binding fragment thereof comprising at least one, two, three, four, five, or six CDRs selected from: a. CDR-H1 comprising the amino acid sequence of SEQ ID NO: 746, b. CDR-H2 comprising the amino acid sequence of SEQ ID NO: 1288, c. CDR-H3 comprising the amino acid sequence of SEQ ID NO: 1830, d. CDR-L1 comprising the amino acid sequence of SEQ ID NO: 1017, e. CDR-L2 comprising the amino acid sequence of SEQ ID NO: 1559, and f. CDR-L3 comprising the amino acid sequence of SEQ ID NO: 2101.

[2461] In one aspect, the present disclosure provides an antibody or antigen-binding fragment thereof comprising a CDR-H3 comprising the amino acid sequence of SEQ ID NO: 1830, and a CDR-L3 comprising the amino acid sequence of SEQ ID NO: 2101.

[2462] In one aspect, the present disclosure provides an antibody or antigen-binding fragment thereof comprising at least one, at least two, or all three VH CDR sequences selected from: a. CDR-H1 comprising the amino acid sequence of SEQ ID NO: 746, b. CDR-H2 comprising the amino acid sequence of SEQ ID NO: 1288, c. CDR-H3 comprising the amino acid sequence of SEQ ID NO: 1830, and a VL comprising the amino acid sequence of SEQ ID NO: 475.

[2463] In one aspect, the present disclosure provides an antibody or antigen-binding fragment thereof comprising at least one, at least two, or all three VL CDR sequences selected from: a. CDR-L1 comprising the amino acid sequence of SEQ ID NO: 1017, b. CDR-L2 comprising the amino acid sequence of SEQ ID NO: 1559, c. CDR-L3 comprising the amino acid sequence of SEQ ID NO: 2101, and a VH comprising the amino acid sequence of SEQ ID NO: 204.

[2464] In one aspect, an antibody or antigen-binding fragment thereof is provided, wherein the antibody or antigen-binding fragment thereof comprises a heavy chain variable domain (VH) having at least 90%, 91%, 92%, 93%, 94%, 95%, 96%, 97%, 98%, 99%, or 100% sequence identity to the amino acid sequence SEQ ID NO: 204. In some embodiments, a VH sequence having at least 90%, 91%, 92%, 93%, 94%, 95%, 96%, 97%, 98%, or 99% identity contains substitutions (e.g., conservative substitutions), insertions, or deletions relative to the reference sequence, but an antibody or antigen-binding fragment thereof comprising that sequence retains the ability to bind to same antigen as of the parent (e.g., cancer associated antigen). In some embodiments, a total of 1 to 10 amino acids have been substituted, inserted and/or deleted in the amino acid sequence SEQ ID NO: 204. In some embodiments, substitutions, insertions, or deletions occur in regions outside the CDRs (e.g., in the FRs). Optionally, the antibody or antigen-binding fragment thereof comprises the VH sequence SEQ ID NO: 204, including one or more post-translational modifications of that sequence. In a particular embodiment, the VH comprises one, two or three CDRs selected from: a. CDR-H1, comprising the amino acid sequence SEQ ID NO: 746, b. CDR-H2, comprising the amino acid sequence SEQ ID NO: 1288, and c. CDR-H3, comprising the amino acid sequence SEQ ID NO: 1830.

[2465] In one aspect, an antibody or antigen-binding fragment thereof is provided, wherein the antibody or antigen-binding fragment thereof comprises a light chain variable domain (VL) having at least 90%, 91%, 92%, 93%, 94%, 95%, 96%, 97%, 98%, 99%, or 100% sequence identity to the amino acid sequence SEQ ID NO: 475. In some embodiments, a VL sequence having at least 90%, 91%, 92%, 93%, 94%, 95%, 96%, 97%, 98%, or 99% identity contains substitutions (e.g., conservative substitutions), insertions, or deletions relative to the reference sequence, but an antibody or antigen-binding fragment thereof comprising that sequence retains the ability to bind to same antigen as the parent (e.g., cancer associated antigen). In some embodiments, a total of 1 to 10 amino acids have been substituted, inserted and/or deleted in the amino acid sequence SEQ ID NO: 475. In some embodiments, the substitutions, insertions, or deletions occur in regions outside the CDRs (e.g., in the FRs). Optionally, the antibody or antigen-binding fragment thereof comprises the VL sequence SEQ ID NO: 475, including one or more post-translational modifications of that sequence. In a particular embodiment, the VL comprises one, two or three CDRs selected from: a. CDR-L1, comprising the amino acid sequence SEQ ID NO: 1017, b. CDR-L2, comprising the amino acid sequence SEQ ID NO: 1559, and c. CDR-L3, comprising the amino acid sequence SEQ ID NO: 2101.

[2466] In one aspect, an antibody or antigen-binding fragment thereof is provided, wherein the antibody or antigen-binding fragment thereof comprises a VH as in any of the embodiments provided above, and a VL as in any of the embodiments provided above. In some embodiments, the antibody or antigen-binding fragment thereof comprises the VH amino acid sequence of SEQ ID NO: 204, and the VL amino acid sequence of SEQ ID NO: 475, optionally including post-translational modifications of those sequences.

### TOVA1005

[2467] In one aspect, the present disclosure provides an antibody or antigen-binding fragment thereof comprising at least one or both variable regions selected from: a. VH comprising the amino acid sequence of SEQ ID NO: 205 and b. VL comprising the amino acid sequence of SEQ ID NO: 476.

[2468] In one aspect, the present disclosure provides an antibody or antigen-binding fragment thereof comprising at least one, two, three, four, five, or six CDRs selected from: a. CDR-H1 comprising the amino acid sequence of SEQ ID NO: 747, b. CDR-H2 comprising the amino acid sequence of SEQ ID NO: 1289, c. CDR-H3 comprising the amino acid sequence of SEQ ID NO: 1831, d. CDR-L1 comprising the amino acid sequence of SEQ ID NO: 1018, e. CDR-L2 comprising the amino acid sequence of SEQ ID NO: 1560, and f. CDR-L3 comprising the amino acid sequence of SEQ ID NO: 2102.

[2469] In one aspect, the present disclosure provides an antibody or antigen-binding fragment thereof comprising a CDR-H3 comprising the amino acid sequence of SEQ ID NO: 1831, and a CDR-L3 comprising the amino acid sequence of SEQ ID NO: 2102.

[2470] In one aspect, the present disclosure provides an antibody or antigen-binding fragment thereof comprising at least one, at least two, or all three VH CDR sequences selected from: a. CDR-H1 comprising the amino acid sequence of SEQ ID NO: 747, b. CDR-H2 comprising the amino acid sequence of SEQ ID NO: 1289, c. CDR-H3 comprising the amino acid sequence of SEQ ID NO: 1831, and a VL comprising the amino acid sequence of SEQ ID NO: 476.

[2471] In one aspect, the present disclosure provides an antibody or antigen-binding fragment thereof comprising at least one, at least two, or all three VL CDR sequences selected from: a. CDR-L1 comprising the amino acid sequence of SEQ ID NO: 1018, b. CDR-L2 comprising the amino acid sequence of SEQ ID NO: 1560, c. CDR-L3 comprising the amino acid sequence of SEQ ID NO: 2102, and d. VH comprising the amino acid sequence of SEQ ID NO: 205.

[2472] In one aspect, an antibody or antigen-binding fragment thereof is provided, wherein the antibody or antigen-binding fragment thereof comprises a heavy chain variable domain (VH) having at least 90%, 91%, 92%, 93%, 94%, 95%, 96%, 97%, 98%, 99%, or 100% sequence identity to the amino acid sequence SEQ ID NO: 205. In some embodiments, a VH sequence having at least 90%, 91%, 92%, 93%, 94%, 95%, 96%, 97%, 98%, or 99% identity contains substitutions (e.g., conservative substitutions), insertions, or deletions relative to the reference sequence, but an antibody or antigen-binding fragment thereof comprising that sequence retains the ability to bind to same antigen as of the parent (e.g., cancer associated antigen). In some embodiments, a total of 1 to 10 amino acids have been substituted, inserted and/or deleted in the amino acid sequence SEQ ID NO: 205. In some embodiments, substitutions, insertions, or deletions occur in regions outside the CDRs (e.g., in the FRs). Optionally, the antibody or antigen-binding fragment thereof comprises the VH sequence SEQ ID NO: 205, including one or more post-translational modifications of that sequence. In a particular embodiment, the VH comprises one, two or three CDRs selected from: a. CDR-H1, comprising the amino acid sequence SEQ ID NO: 747, b. CDR-H2, comprising the amino acid sequence SEQ ID NO: 1289, and c. CDR-H3, comprising the amino acid sequence SEQ ID NO: 1831.

[2473] In one aspect, an antibody or antigen-binding fragment thereof is provided, wherein the antibody or antigen-binding fragment thereof comprises a light chain variable domain (VL) having at least 90%, 91%, 92%, 93%, 94%, 95%, 96%, 97%, 98%, 99%, or 100% sequence identity to the amino acid sequence SEQ ID NO: 476. In some embodiments, a VL sequence having at least 90%, 91%, 92%, 93%, 94%, 95%, 96%, 97%, 98%, or 99% identity contains substitutions (e.g., conservative substitutions), insertions, or deletions relative to the reference sequence, but an antibody or antigen-binding fragment thereof comprising that sequence retains the ability to bind to same antigen as the parent (e.g., cancer associated antigen). In some embodiments, a total of 1 to 10 amino acids have been substituted, inserted and/or deleted in the amino acid sequence SEQ ID NO: 476. In some embodiments, the substitutions, antigen-binding fragment thereof comprises the VL sequence SEQ ID NO: 476, including one or more post-translational modifications of that sequence. In a particular embodiment, the VL comprises one, two or three CDRs selected from: a. CDR-L1, comprising the amino acid sequence SEQ ID NO: 1018, b. CDR-L2, comprising the amino acid sequence SEQ ID NO: 1560, and c. CDR-L3, comprising the amino acid sequence SEQ ID NO: 2102.

[2474] In one aspect, an antibody or antigen-binding fragment thereof is provided, wherein the antibody or antigen-binding fragment thereof comprises a VH as in any of the embodiments provided above, and a VL as in any of the embodiments provided above. In some embodiments, the antibody or antigen-binding fragment thereof comprises the VH amino acid sequence of SEQ ID NO: 205, and the VL amino acid sequence of SEQ ID NO: 476, optionally including post-translational modifications of those sequences.

### TOVA1006

[2475] In one aspect, the present disclosure provides an antibody or antigen-binding fragment thereof comprising at least one or both variable regions selected from: a. VH comprising the amino acid sequence of SEQ ID NO: 206 and b. VL comprising the amino acid sequence of SEQ ID NO: 477.

[2476] In one aspect, the present disclosure provides an antibody or antigen-binding fragment thereof comprising at least one, two, three, four, five, or six CDRs selected from: a. CDR-H1 comprising the amino acid sequence of SEQ ID NO: 748, b. CDR-H2 comprising the amino acid sequence of SEQ ID NO: 1290, c. CDR-H3 comprising the amino acid sequence of SEQ ID NO: 1832, d. CDR-L1 comprising the amino acid sequence of SEQ ID NO: 1019, e. CDR-L2 comprising the amino acid sequence of SEQ ID NO: 1561, and f. CDR-L3 comprising the amino acid sequence of SEQ ID NO: 2103.

[2477] In one aspect, the present disclosure provides an antibody or antigen-binding fragment thereof comprising a CDR-H3 comprising the amino acid sequence of SEQ ID NO: 1832, and a CDR-L3 comprising the amino acid sequence of SEQ ID NO: 2103.

[2478] In one aspect, the present disclosure provides an antibody or antigen-binding fragment thereof comprising at least one, at least two, or all three VH CDR sequences selected from: a. CDR-H1 comprising the amino acid sequence of SEQ ID NO: 748, b. CDR-H2 comprising the amino acid sequence of SEQ ID NO: 1290, c. CDR-H3 comprising the amino acid sequence of SEQ ID NO: 1832, and a VL comprising the amino acid sequence of SEQ ID NO: 477.

[2479] In one aspect, the present disclosure provides an antibody or antigen-binding fragment thereof comprising at least one, at least two, or all three VH CDR sequences selected from: a. CDR-H1 comprising the amino acid sequence of SEQ ID NO: 748, b. CDR-H2 comprising the amino acid sequence of SEQ ID NO: 1290, c. CDR-H3 comprising the amino acid sequence of SEQ ID NO: 1832, and a VL comprising the amino acid sequence of SEQ ID NO: 477.

[2480] In one aspect, the present disclosure provides an antibody or antigen-binding fragment thereof comprising at least one, at least two, or all three VL CDR sequences selected from: a. CDR-L1 comprising the amino acid sequence of SEQ ID NO: 1019, b. CDR-L2 comprising the amino acid sequence of SEQ ID NO: 1561, c. CDR-L3 comprising the amino acid sequence of SEQ ID NO: 2103, and a VH comprising the amino acid sequence of SEQ ID NO: 206.

[2481] In one aspect, an antibody or antigen-binding fragment thereof is provided, wherein the antibody or antigen-binding fragment thereof comprises a heavy chain variable domain (VH) having at least 90%, 91%, 92%, 93%, 94%, 95%, 96%, 97%, 98%, 99%, or 100% sequence identity to the amino acid sequence SEQ ID NO: 206. In some embodiments, a VH sequence having at least 90%, 91%, 92%, 93%, 94%, 95%, 96%, 97%, 98%, or 99% identity contains substitutions (e.g., conservative substitutions), insertions, or deletions relative to the reference sequence, but an antibody or antigen-binding fragment thereof comprising that sequence retains the ability to bind to same antigen as of the parent (e.g., cancer associated antigen). In some embodiments, a total of 1 to 10 amino acids have been substituted, inserted and/or deleted in the amino acid sequence SEQ ID NO: 206. In some embodiments, substitutions, insertions, or deletions occur in regions outside the CDRs (e.g., in the FRs). Optionally, the antibody or antigen-binding fragment thereof comprises the VH sequence SEQ ID NO: 206, including one or more post-translational modifications of that sequence. In a particular embodiment, the VH comprises one, two or three CDRs selected from: a. CDR-H1, comprising the amino acid sequence SEQ ID NO: 748, b. CDR-H2, comprising the amino acid sequence SEQ ID NO: 1290, and c. CDR-H3, comprising the amino acid sequence SEQ ID NO: 1832.

[2482] In one aspect, an antibody or antigen-binding fragment thereof is provided, wherein the antibody or antigen-binding fragment thereof comprises a light chain variable domain (VL) having at least 90%, 91%, 92%, 93%, 94%, 95%, 96%, 97%, 98%, 99%, or 100% sequence identity to the amino acid sequence SEQ ID NO: 477. In some embodiments, a VL sequence having at least 90%, 91%, 92%, 93%, 94%, 95%, 96%, 97%, 98%, or 99% identity contains substitutions (e.g., conservative substitutions), insertions, or deletions relative to the reference sequence, but an antibody or antigen-binding fragment thereof comprising that sequence retains the ability to bind to same antigen as the parent (e.g., cancer associated antigen). In some embodiments, a total of 1 to 10 amino acids have been substituted, inserted and/or deleted in the amino acid sequence SEQ ID NO: 477. In some embodiments, the substitutions, insertions, or deletions occur in regions outside the CDRs (e.g., in the FRs). Optionally, the antibody or antigen-binding fragment thereof comprises the VL sequence SEQ ID NO: 477, including one or more post-translational modifications of that sequence. In a particular embodiment, the VL comprises one, two or three CDRs selected from: a. CDR-L1, comprising the amino acid sequence SEQ ID NO: 1019, b. CDR-L2, comprising the amino acid sequence SEQ ID NO: 1561, and c. CDR-L3, comprising the amino acid sequence SEQ ID NO: 2103.

[2483] In one aspect, an antibody or antigen-binding fragment thereof is provided, wherein the antibody or antigen-binding fragment thereof comprises a VH as in any of the embodiments provided above, and a VL as in any of the embodiments provided above. In some embodiments, the antibody or antigen-binding fragment thereof comprises the VH amino acid sequence of SEQ ID NO: 206, and the VL amino acid sequence of SEQ ID NO: 477, optionally including post-translational modifications of those sequences.

### TOVA1007

[2484] In one aspect, the present disclosure provides an antibody or antigen-binding fragment thereof comprising at least one or both variable regions selected from: a. VH comprising the amino acid sequence of SEQ ID NO: 207 and b. VL comprising the amino acid sequence of SEQ ID NO: 478.

[2485] In one aspect, the present disclosure provides an antibody or antigen-binding fragment thereof comprising at least one, two, three, four, five, or six CDRs selected from: a. CDR-H1 comprising the amino acid sequence of SEQ ID NO: 749, b. CDR-H2 comprising the amino acid sequence of SEQ ID NO: 1291, c. CDR-H3 comprising the amino acid sequence of SEQ ID NO: 1833, d. CDR-L1 comprising the amino acid sequence of SEQ ID NO: 1020, e. CDR-L2 comprising the amino acid sequence of SEQ ID NO: 1562, and f. CDR-L3 comprising the amino acid sequence of SEQ ID NO: 2104.

[2486] In one aspect, the present disclosure provides an antibody or antigen-binding fragment thereof comprising a CDR-H3 and a CDR-L3 comprising the amino acid sequence of SEQ ID NO: 2104.

[2487] In one aspect, the present disclosure provides an antibody or antigen-binding fragment thereof comprising at least one, at least two, or all three VH CDR sequences selected from: a. CDR-H1 comprising the amino acid sequence of SEQ ID NO: 749, b. CDR-H2 comprising the amino acid sequence of SEQ ID NO: 1291, c. CDR-H3 comprising the amino acid sequence of SEQ ID NO: 1833, and a VL comprising the amino acid sequence of SEQ ID NO: 478.

[2488] In one aspect, the present disclosure provides an antibody or antigen-binding fragment thereof comprising at least one, at least two, or all three VL CDR sequences selected from: a. CDR-L1 comprising the amino acid sequence of SEQ ID NO: 1020, b. CDR-L2 comprising the amino acid sequence of SEQ ID NO: 1562, c. CDR-L3 comprising the amino acid sequence of SEQ ID NO: 2104, and a VH comprising the amino acid sequence of SEQ ID NO: 207.

[2489] In one aspect, an antibody or antigen-binding fragment thereof is provided, wherein the antibody or antigen-binding fragment thereof comprises a heavy chain variable domain (VH) having at least 90%, 91%, 92%, 93%, 94%, 95%, 96%, 97%, 98%, 99%, or 100% sequence identity to the amino acid sequence SEQ ID NO: 207. In some embodiments, a VH sequence having at least 90%, 91%, 92%, 93%, 94%, 95%, 96%, 97%, 98%, or 99% identity contains substitutions (e.g., conservative substitutions), insertions, or deletions relative to the reference sequence, but an antibody or antigen-binding fragment thereof comprising that sequence retains the ability to bind to same antigen as of the parent (e.g., cancer associated antigen). In some embodiments, a total of 1 to 10 amino acids have been substituted, inserted and/or deleted in the amino acid sequence SEQ ID NO: 207. In some embodiments, substitutions, insertions, or deletions occur in regions outside the CDRs (e.g., in the FRs). Optionally, the antibody or antigen-binding fragment thereof comprises the VH sequence SEQ ID NO: 207, including one or more post-translational modifications of that sequence. In a particular embodiment, the VH comprises one, two or three CDRs selected from: a. CDR-H1, comprising the amino acid sequence SEQ ID NO: 749, b. CDR-H2, comprising the amino acid sequence SEQ ID NO: 1291, and c. CDR-H3, comprising the amino acid sequence SEQ ID NO: 1833.

[2490] In one aspect, an antibody or antigen-binding fragment thereof is provided, wherein the antibody or antigen-binding fragment thereof comprises a light chain variable domain (VL) having at least 90%, 91%, 92%, 93%, 94%, 95%, 96%, 97%, 98%, 99%, or 100% sequence identity to the amino acid sequence SEQ ID NO: 478. In some embodiments, a VL sequence having at least 90%, 91%, 92%, 93%, 94%, 95%, 96%, 97%, 98%, or 99% identity contains substitutions (e.g., conservative substitutions), insertions, or deletions relative to the reference sequence, but an antibody or antigen-binding fragment thereof comprising that sequence retains the ability to bind to same antigen as the parent (e.g., cancer associated antigen). In some embodiments, a total of 1 to 10 amino acids have been substituted, inserted and/or deleted in the amino acid sequence SEQ ID NO: 478. In some embodiments, the substitutions, insertions, or deletions occur in regions outside the CDRs (e.g., in the FRs). Optionally, the antibody or antigen-binding fragment thereof comprises the VL sequence SEQ ID NO: 478, including one or more post-translational modifications of that sequence. In a particular embodiment, the VL comprises one, two or three CDRs selected from: a. CDR-L1, comprising the amino acid sequence SEQ ID NO: 1020, b. CDR-L2, comprising the amino acid sequence SEQ ID NO: 1562, and c. CDR-L3, comprising the amino acid sequence SEQ ID NO: 2104.

[2491] In one aspect, an antibody or antigen-binding fragment thereof is provided, wherein the antibody or antigen-binding fragment thereof comprises a VH as in any of the embodiments provided above, and a VL as in any of the embodiments provided above. In some embodiments, the antibody or antigen-binding fragment thereof comprises the VH amino acid sequence of SEQ ID NO: 207, and the VL amino acid sequence of SEQ ID NO: 478, optionally including post-translational modifications of those sequences.

### TOVA1008

[2492] In one aspect, the present disclosure provides an antibody or antigen-binding fragment thereof comprising at least one or both variable regions selected from: a. VH comprising the amino acid sequence of SEQ ID NO: 208 and b. VL comprising the amino acid sequence of SEQ ID NO: 479.

[2493] In one aspect, the present disclosure provides an antibody or antigen-binding fragment thereof comprising at least one, two, three, four, five, or six CDRs selected from: a. CDR-H1 comprising the amino acid sequence of SEQ ID NO: 750, b. CDR-H2 comprising the amino acid sequence of SEQ ID NO: 1292, c. CDR-H3 comprising the amino acid sequence of SEQ ID NO: 1834, d. CDR-L1 comprising the amino acid sequence of SEQ ID NO: 1021, e. CDR-L2 comprising the amino acid sequence of SEQ ID NO: 1563, and f. CDR-L3 comprising the amino acid sequence of SEQ ID NO: 2105.

[2494] In one aspect, the present disclosure provides an antibody or antigen-binding fragment thereof comprising a CDR-H3 comprising the amino acid sequence of SEQ ID NO: 1834, and a CDR-L3 comprising the amino acid sequence of SEQ ID NO: 2105.

[2495] In one aspect, the present disclosure provides an antibody or antigen-binding fragment thereof comprising at least one, at least two, or all three VH CDR sequences selected from: a. CDR-H1 comprising the amino acid sequence of SEQ ID NO: 750, b. CDR-H2 comprising the amino acid sequence of SEQ ID NO: 1292, c. CDR-H3 comprising the amino acid sequence of SEQ ID NO: 1834, and a VL comprising the amino acid sequence of SEQ ID NO: 479.

[2496] In one aspect, the present disclosure provides an antibody or antigen-binding fragment thereof comprising at least one, at least two, or all three VL CDR sequences selected from: a. CDR-L1 comprising the amino acid sequence of SEQ ID NO: 1021, b. CDR-L2 comprising the amino acid sequence of SEQ ID NO: 1563, c. CDR-L3 comprising the amino acid sequence of SEQ ID NO: 2105, and a VH comprising the amino acid sequence of SEQ ID NO: 208.

[2497] In one aspect, an antibody or antigen-binding fragment thereof is provided, wherein the antibody or antigen-binding fragment thereof comprises a heavy chain variable domain (VH) having at least 90%, 91%, 92%, 93%, 94%, 95%, 96%, 97%, 98%, 99%, or 100% sequence identity to the amino acid sequence SEQ ID NO: 208. In some embodiments, a VH sequence having at least 90%, 91%, 92%, 93%, 94%, 95%, 96%, 97%, 98%, or 99% identity contains substitutions (e.g., conservative substitutions), insertions, or deletions relative to the reference sequence, but an antibody or antigen-binding fragment thereof comprising that sequence retains the ability to bind to same antigen as of the parent (e.g., cancer associated antigen). In some embodiments, a total of 1 to 10 amino acids have been substituted, inserted and/or deleted in the amino acid sequence SEQ ID NO: 208. In some embodiments, substitutions, insertions, or deletions occur in regions outside the CDRs (e.g., in the FRs). Optionally, the antibody or antigen-binding fragment thereof comprises the VH sequence SEQ ID NO: 208, including one or more post-translational modifications of that sequence. In a particular embodiment, the VH comprises one, two or three CDRs selected from: a. CDR-H1, comprising the amino acid sequence SEQ ID NO: 750, b. CDR-H2, comprising the amino acid sequence SEQ ID NO: 1292, and c. CDR-H3, comprising the amino acid sequence SEQ ID NO: 1834.

[2498] In one aspect, an antibody or antigen-binding fragment thereof is provided, wherein the antibody or antigen-binding fragment thereof comprises a light chain variable domain (VL) having at least 90%, 91%, 92%, 93%, 94%, 95%, 96%, 97%, 98%, 99%, or 100% sequence identity to the amino acid sequence SEQ ID NO: 479. In some embodiments, a VL sequence having at least 90%, 91%, 92%, 93%, 94%, 95%, 96%, 97%, 98%, or 99% identity contains substitutions (e.g., conservative substitutions), insertions, or deletions relative to the reference sequence, but an antibody or antigen-binding fragment thereof comprising that sequence retains the ability to bind to same antigen as the parent (e.g., cancer associated antigen). In some embodiments, a total of 1 to 10 amino acids have been substituted, inserted and/or deleted in the amino acid sequence SEQ ID NO: 479. In some embodiments, the substitutions, insertions, or deletions occur in regions outside the CDRs (e.g., in the FRs). Optionally, the antibody or antigen-binding fragment thereof comprises the VL sequence SEQ ID NO: 479, including one or more post-translational modifications of that sequence. In a particular embodiment, the VL comprises one, two or three CDRs selected from: a. CDR-L1, comprising the amino acid sequence SEQ ID NO: 1021, b. CDR-L2, comprising the amino acid sequence SEQ ID NO: 1563, and c. CDR-L3, comprising the amino acid sequence SEQ ID NO: 2105.

[2499] In one aspect, an antibody or antigen-binding fragment thereof is provided, wherein the antibody or antigen-binding fragment thereof comprises a VH as in any of the embodiments provided above, and a VL as in any of the embodiments provided above. In some embodiments, the antibody or antigen-binding fragment thereof comprises the VH amino acid sequence of SEQ ID NO: 208, and the VL amino acid sequence of SEQ ID NO: 479, optionally including post-translational modifications of those sequences.

### TPAN1001

[2500] In one aspect, the present disclosure provides an antibody or antigen-binding fragment thereof comprising at least one or both variable regions selected from: a. VH comprising the amino acid sequence of SEQ ID NO: 209 and b. VL comprising the amino acid sequence of SEQ ID NO: 480.

[2501] In one aspect, the present disclosure provides an antibody or antigen-binding fragment thereof comprising at least one, two, three, four, five, or six CDRs selected from: a. CDR-H1 comprising the amino acid sequence of SEQ ID NO: 751, b. CDR-H2 comprising the amino acid sequence of SEQ ID NO: 1293, c. CDR-H3 comprising the amino acid sequence of SEQ ID NO: 1835, d. CDR-L1 comprising the amino acid sequence of SEQ ID NO: 1022, e. CDR-L2 comprising the amino acid sequence of SEQ ID NO: 1564, and f. CDR-L3 comprising the amino acid sequence of SEQ ID NO: 2106.

[2502] In one aspect, the present disclosure provides an antibody or antigen-binding fragment thereof comprising a CDR-H3 comprising the amino acid sequence of SEQ ID NO: 1835, and a CDR-L3 comprising the amino acid sequence of SEQ ID NO: 2106.

[2503] In one aspect, the present disclosure provides an antibody or antigen-binding fragment thereof comprising at least one, at least two, or all three VH CDR sequences selected from: a. CDR-H1 comprising the amino acid sequence of SEQ ID NO: 751, b. CDR-H2 comprising the amino acid sequence of SEQ ID NO: 1293, c. CDR-H3 comprising the amino acid sequence of SEQ ID NO: 1835, and a VL comprising the amino acid sequence of SEQ ID NO: 480.

[2504] In one aspect, the present disclosure provides an antibody or antigen-binding fragment thereof comprising at least one, at least two, or all three VL CDR sequences selected from: a. CDR-L1 comprising the amino acid sequence of SEQ ID NO: 1022, b. CDR-L2 comprising the amino acid sequence of SEQ ID NO: 1564, c. CDR-L3 comprising the amino acid sequence of SEQ ID NO: 2106, and a VH comprising the amino acid sequence of SEQ ID NO: 209.

[2505] In one aspect, an antibody or antigen-binding fragment thereof is provided, wherein the antibody or antigen-binding fragment thereof comprises a heavy chain variable domain (VH) having at least 90%, 91%, 92%, 93%, 94%, 95%, 96%, 97%, 98%, 99%, or 100% sequence identity to the amino acid sequence SEQ ID NO: 209. In some embodiments, a VH sequence having at least 90%, 91%, 92%, 93%, 94%, 95%, 96%, 97%, 98%, or 99% identity contains substitutions (e.g., conservative substitutions), insertions, or deletions relative to the reference sequence, but an antibody or antigen-binding fragment thereof comprising that sequence retains the ability to bind to same antigen as of the parent (e.g., cancer associated antigen). In some embodiments, a total of 1 to 10 amino acids have been substituted, inserted and/or deleted in the amino acid sequence SEQ ID NO: 209. In some embodiments, substitutions, insertions, or deletions occur in regions outside the CDRs (e.g., in the FRs). Optionally, the antibody or antigen-binding fragment thereof comprises the VH sequence SEQ ID NO: 209, including one or more post-translational modifications of that sequence. In a particular embodiment, the VH comprises one, two or three CDRs selected from: a. CDR-H1, comprising the amino acid sequence SEQ ID NO: 751, b. CDR-H2, comprising the amino acid sequence SEQ ID NO: 1293, and c. CDR-H3, comprising the amino acid sequence SEQ ID NO: 1835.

[2506] In one aspect, an antibody or antigen-binding fragment thereof is provided, wherein the antibody or antigen-binding fragment thereof comprises a light chain variable domain (VL) having at least 90%, 91%, 92%, 93%, 94%, 95%, 96%, 97%, 98%, 99%, or 100% sequence identity to the amino acid sequence SEQ ID NO: 480. In some embodiments, a VL sequence having at least 90%, 91%, 92%, 93%, 94%, 95%, 96%, 97%, 98%, or 99% identity contains substitutions (e.g., conservative substitutions), insertions, or deletions relative to the reference sequence, but an antibody or antigen-binding fragment thereof comprising that sequence retains the ability to bind to same antigen as the parent (e.g., cancer associated antigen). In some embodiments, a total of 1 to 10 amino acids have been substituted, inserted and/or deleted in the amino acid sequence SEQ ID NO: 480. In some embodiments, the substitutions, insertions, or deletions occur in regions outside the CDRs (e.g., in the FRs). Optionally, the antibody or antigen-binding fragment thereof comprises the VL sequence SEQ ID NO: 480, including one or more post-translational modifications of that sequence. In a particular embodiment, the VL comprises one, two or three CDRs selected from: a. CDR-L1, comprising the amino acid sequence SEQ ID NO: 1022, b. CDR-L2, comprising the amino acid sequence SEQ ID NO: 1564, and c. CDR-L3, comprising the amino acid sequence SEQ ID NO: 2106.

[2507] In one aspect, an antibody or antigen-binding fragment thereof is provided, wherein the antibody or antigen-binding fragment thereof comprises a VH as in any of the embodiments provided above, and a VL as in any of the embodiments provided above. In some embodiments, the antibody or antigen-binding fragment thereof comprises the VH amino acid sequence of SEQ ID NO: 209, and the VL amino acid sequence of SEQ ID NO: 480, optionally including post-translational modifications of those sequences.

### TPAN1002

[2508] In one aspect, the present disclosure provides an antibody or antigen-binding fragment thereof comprising at least one or both variable regions selected from: a. VH comprising the amino acid sequence of SEQ ID NO: 210 and b. VL comprising the amino acid sequence of SEQ ID NO: 481.

[2509] In one aspect, the present disclosure provides an antibody or antigen-binding fragment thereof comprising at least one, two, three, four, five, or six CDRs selected from: a. CDR-H1 comprising the amino acid sequence of SEQ ID NO: 752, b. CDR-H2 comprising the amino acid sequence of SEQ ID NO: 1294, c. CDR-H3 comprising the amino acid sequence of SEQ ID NO: 1836, d. CDR-L1 comprising the amino acid sequence of SEQ ID NO: 1023, e. CDR-L2 comprising the amino acid sequence of SEQ ID NO: 1565, and f. CDR-L3 comprising the amino acid sequence of SEQ ID NO: 2107.

[2510] In one aspect, the present disclosure provides an antibody or antigen-binding fragment thereof comprising a CDR-H3 comprising the amino acid sequence of SEQ ID NO: 1836, and a CDR-L3 comprising the amino acid sequence of SEQ ID NO: 2107.

[2511] In one aspect, the present disclosure provides an antibody or antigen-binding fragment thereof comprising at least one, at least two, or all three VH CDR sequences selected from: a. CDR-H1 comprising the amino acid sequence of SEQ ID NO: 752, b. CDR-H2 comprising the amino acid sequence of SEQ ID NO: 1294, c. CDR-H3 comprising the amino acid sequence of SEQ ID NO: 1836, and a VL comprising the amino acid sequence of SEQ ID NO: 481.

[2512] In one aspect, the present disclosure provides an antibody or antigen-binding fragment thereof comprising at least one, at least two, or all three VL CDR sequences selected from: a. CDR-L1 comprising the amino acid sequence of SEQ ID NO: 1023, b. CDR-L2 comprising the amino acid sequence of SEQ ID NO: 1565, c. CDR-L3 comprising the amino acid sequence of SEQ ID NO: 2107, and a VH comprising the amino acid sequence of SEQ ID NO: 210.

[2513] In one aspect, an antibody or antigen-binding fragment thereof is provided, wherein the antibody or antigen-binding fragment thereof comprises a heavy chain variable domain (VH) having at least 90%, 91%, 92%, 93%, 94%, 95%, 96%, 97%, 98%, 99%, or 100% sequence identity to the amino acid sequence SEQ ID NO: 210. In some embodiments, a VH sequence having at least 90%, 91%, 92%, 93%, 94%, 95%, 96%, 97%, 98%, or 99% identity contains substitutions (e.g., conservative substitutions), insertions, or deletions relative to the reference sequence, but an antibody or antigen-binding fragment thereof comprising that sequence retains the ability to bind to same antigen as of the parent (e.g., cancer associated antigen). In some embodiments, a total of 1 to 10 amino acids have been substituted, inserted and/or deleted in the amino acid sequence SEQ ID NO: 210. In some embodiments, substitutions, insertions, or deletions occur in regions outside the CDRs (e.g., in the FRs). Optionally, the antibody or antigen-binding fragment thereof comprises the VH sequence SEQ ID NO: 210, including one or more post-translational modifications of that sequence. In a particular embodiment, the VH comprises one, two or three CDRs selected from: a. CDR-H1, comprising the amino acid sequence SEQ ID NO: 752, b. CDR-H2, comprising the amino acid sequence SEQ ID NO: 1294, and c. CDR-H3, comprising the amino acid sequence SEQ ID NO: 1836.

[2514] In one aspect, an antibody or antigen-binding fragment thereof is provided, wherein the antibody or antigen-binding fragment thereof comprises a light chain variable domain (VL) having at least 90%, 91%, 92%, 93%, 94%, 95%, 96%, 97%, 98%, 99%, or 100% sequence identity to the amino acid sequence SEQ ID NO: 481. In some embodiments, a VL sequence having at least 90%, 91%, 92%, 93%, 94%, 95%, 96%, 97%, 98%, or 99% identity contains substitutions (e.g., conservative substitutions), insertions, or deletions relative to the reference sequence, but an antibody or antigen-binding fragment thereof comprising that sequence retains the ability to bind to same antigen as the parent (e.g., cancer associated antigen). In some embodiments, a total of 1 to 10 amino acids have been substituted, inserted and/or deleted in the amino acid sequence SEQ ID NO: 481. In some embodiments, the substitutions, insertions, or deletions occur in regions outside the CDRs (e.g., in the FRs). Optionally, the antibody or antigen-binding fragment thereof comprises the VL sequence SEQ ID NO: 481, including one or more post-translational modifications of that sequence. In a particular embodiment, the VL comprises one, two or three CDRs selected from: a. CDR-L1, comprising the amino acid sequence SEQ ID NO: 1023, b. CDR-L2, comprising the amino acid sequence SEQ ID NO: 1565, and c. CDR-L3, comprising the amino acid sequence SEQ ID NO: 2107.

[2515] In one aspect, an antibody or antigen-binding fragment thereof is provided, wherein the antibody or antigen-binding fragment thereof comprises a VH as in any of the embodiments provided above, and a VL as in any of the embodiments provided above. In some embodiments, the antibody or antigen-binding fragment thereof comprises the VH amino acid sequence of SEQ ID NO: 210, and the VL amino acid sequence of SEQ ID NO: 481, optionally including post-translational modifications of those sequences.

### TPAN1003

[2516] In one aspect, the present disclosure provides an antibody or antigen-binding fragment thereof comprising at least one or both variable regions selected from: a. VH comprising the amino acid sequence of SEQ ID NO: 211 and b. VL comprising the amino acid sequence of SEQ ID NO: 482.

[2517] In one aspect, the present disclosure provides an antibody or antigen-binding fragment thereof comprising at least one, two, three, four, five, or six CDRs selected from: a. CDR-H1 comprising the amino acid sequence of SEQ ID NO: 753, b. CDR-H2 comprising the amino acid sequence of SEQ ID NO: 1295, c. CDR-H3 comprising the amino acid sequence of SEQ ID NO: 1837, d. CDR-L1 comprising the amino acid sequence of SEQ ID NO: 1024, e. CDR-L2 comprising the amino acid sequence of SEQ ID NO: 1566, and f. CDR-L3 comprising the amino acid sequence of SEQ ID NO: 2108.

[2518] In one aspect, the present disclosure provides an antibody or antigen-binding fragment thereof comprising a CDR-H3 comprising the amino acid sequence of SEQ ID NO: 1837, and a CDR-L3 comprising the amino acid sequence of SEQ ID NO: 2108.

[2519] In one aspect, the present disclosure provides an antibody or antigen-binding fragment thereof comprising at least one, at least two, or all three VH CDR sequences selected from: a. CDR-H1 comprising the amino acid sequence of SEQ ID NO: 753, b. CDR-H2 comprising the amino acid sequence of SEQ ID NO: 1295, c. CDR-H3 comprising the amino acid sequence of SEQ ID NO: 1837, and a VL comprising the amino acid sequence of SEQ ID NO: 482.

[2520] In one aspect, the present disclosure provides an antibody or antigen-binding fragment thereof comprising at least one, at least two, or all three VL CDR sequences selected from: a. CDR-L1 comprising the amino acid sequence of SEQ ID NO: 1024, b. CDR-L2 comprising the amino acid sequence of SEQ ID NO: 1566, c. CDR-L3 comprising the amino acid sequence of SEQ ID NO: 2108, and a VH comprising the amino acid sequence of SEQ ID NO: 211.

[2521] In one aspect, an antibody or antigen-binding fragment thereof is provided, wherein the antibody or antigen-binding fragment thereof comprises a heavy chain variable domain (VH) having at least 90%, 91%, 92%, 93%, 94%, 95%, 96%, 97%, 98%, 99%, or 100% sequence identity to the amino acid sequence SEQ ID NO: 211. In some embodiments, a VH sequence having at least 90%, 91%, 92%, 93%, 94%, 95%, 96%, 97%, 98%, or 99% identity contains substitutions (e.g., conservative substitutions), insertions, or deletions relative to the reference sequence, but an antibody or antigen-binding fragment thereof comprising that sequence retains the ability to bind to same antigen as of the parent (e.g., cancer associated antigen). In some embodiments, a total of 1 to 10 amino acids have been substituted, inserted and/or deleted in the amino acid sequence SEQ ID NO: 211. In some embodiments, substitutions, insertions, or deletions occur in regions outside the CDRs (e.g., in the FRs). Optionally, the antibody or antigen-binding fragment thereof comprises the VH sequence SEQ ID NO: 211, including one or more post-translational modifications of that sequence. In a particular embodiment, the VH comprises one, two or three CDRs selected from: a. CDR-H1, comprising the amino acid sequence SEQ ID NO: 753, b. CDR-H2, comprising the amino acid sequence SEQ ID NO: 1295, and c. CDR-H3, comprising the amino acid sequence SEQ ID NO: 1837.

[2522] In one aspect, an antibody or antigen-binding fragment thereof is provided, wherein the antibody or antigen-binding fragment thereof comprises a light chain variable domain (VL) having at least 90%, 91%, 92%, 93%, 94%, 95%, 96%, 97%, 98%, 99%, or 100% sequence identity to the amino acid sequence SEQ ID NO: 482. In some embodiments, a VL sequence having at least 90%, 91%, 92%, 93%, 94%, 95%, 96%, 97%, 98%, or 99% identity contains substitutions (e.g., conservative substitutions), insertions, or deletions relative to the reference sequence, but an antibody or antigen-binding fragment thereof comprising that sequence retains the ability to bind to same antigen as the parent (e.g., cancer associated antigen). In some embodiments, a total of 1 to 10 amino acids have been substituted, inserted and/or deleted in the amino acid sequence SEQ ID NO: 482. In some embodiments, the substitutions, insertions, or deletions occur in regions outside the CDRs (e.g., in the FRs). Optionally, the antibody or antigen-binding fragment thereof comprises the VL sequence SEQ ID NO: 482, including one or more post-translational modifications of that sequence. In a particular embodiment, the VL comprises one, two or three CDRs selected from: a. CDR-L1, comprising the amino acid sequence SEQ ID NO: 1024, b. CDR-L2, comprising the amino acid sequence SEQ ID NO: 1566, and c. CDR-L3, comprising the amino acid sequence SEQ ID NO: 2108.

[2523] In one aspect, an antibody or antigen-binding fragment thereof is provided, wherein the antibody or antigen-binding fragment thereof comprises a VH as in any of the embodiments provided above, and a VL as in any of the embodiments provided above. In some embodiments, the antibody or antigen-binding fragment thereof comprises the VH amino acid sequence of SEQ ID NO: 211, and the VL amino acid sequence of SEQ ID NO: 482, optionally including post-translational modifications of those sequences.

### TPAN1004

[2524] In one aspect, the present disclosure provides an antibody or antigen-binding fragment thereof comprising at least one or both variable regions selected from: a. VH comprising the amino acid sequence of SEQ ID NO: 212 and b. VL comprising the amino acid sequence of SEQ ID NO: 483.

[2525] In one aspect, the present disclosure provides an antibody or antigen-binding fragment thereof comprising at least one, two, three, four, five, or six CDRs selected from: a. CDR-H1 comprising the amino acid sequence of SEQ ID NO: 754, b. CDR-H2 comprising the amino acid sequence of SEQ ID NO: 1296, c. CDR-H3 comprising the amino acid sequence of SEQ ID NO: 1838, d. CDR-L1 comprising the amino acid sequence of SEQ ID NO: 1025, e. CDR-L2 comprising the amino acid sequence of SEQ ID NO: 1567, and f. CDR-L3 comprising the amino acid sequence of SEQ ID NO: 2109.

[2526] In one aspect, the present disclosure provides an antibody or antigen-binding fragment thereof comprising a CDR-H3 comprising the amino acid sequence of SEQ ID NO: 1838, and a CDR-L3 comprising the amino acid sequence of SEQ ID NO: 2109.

[2527] In one aspect, the present disclosure provides an antibody or antigen-binding fragment thereof comprising at least one, at least two, or all three VH CDR sequences selected from: a. CDR-H1 comprising the amino acid sequence of SEQ ID NO: 754, b. CDR-H2 comprising the amino acid sequence of SEQ ID NO: 1296, c. CDR-H3 comprising the amino acid sequence of SEQ ID NO: 1838, and a VL comprising the amino acid sequence of SEQ ID NO: 483.

[2528] In one aspect, the present disclosure provides an antibody or antigen-binding fragment thereof comprising at least one, at least two, or all three VL CDR sequences selected from: a. CDR-L1 comprising the amino acid sequence of SEQ ID NO: 1025, b. CDR-L2 comprising the amino acid sequence of SEQ ID NO: 1567, c. CDR-L3 comprising the amino acid sequence of SEQ ID NO: 2109, and a VH comprising the amino acid sequence of SEQ ID NO: 212.

[2529] In one aspect, an antibody or antigen-binding fragment thereof is provided, wherein the antibody or antigen-binding fragment thereof comprises a heavy chain variable domain (VH) having at least 90%, 91%, 92%, 93%, 94%, 95%, 96%, 97%, 98%, 99%, or 100% sequence identity to the amino acid sequence SEQ ID NO: 212. In some embodiments, a VH sequence having at least 90%, 91%, 92%, 93%, 94%, 95%, 96%, 97%, 98%, or 99% identity contains substitutions (e.g., conservative substitutions), insertions, or deletions relative to the reference sequence, but an antibody or antigen-binding fragment thereof comprising that sequence retains the ability to bind to same antigen as of the parent (e.g., cancer associated antigen). In some embodiments, a total of 1 to 10 amino acids have been substituted, inserted and/or deleted in the amino acid sequence SEQ ID NO: 212. In some embodiments, substitutions, insertions, or deletions occur in regions outside the CDRs (e.g., in the FRs). Optionally, the antibody or antigen-binding fragment thereof comprises the VH sequence SEQ ID NO: 212, including one or more post-translational modifications of that sequence. In a particular embodiment, the VH comprises one, two or three CDRs selected from: a. CDR-H1, comprising the amino acid sequence SEQ ID NO: 754, b. CDR-H2, comprising the amino acid sequence SEQ ID NO: 1296, and c. CDR-H3, comprising the amino acid sequence SEQ ID NO: 1838.

[2530] In one aspect, an antibody or antigen-binding fragment thereof is provided, wherein the antibody or antigen-binding fragment thereof comprises a light chain variable domain (VL) having at least 90%, 91%, 92%, 93%, 94%, 95%, 96%, 97%, 98%, 99%, or 100% sequence identity to the amino acid sequence SEQ ID NO: 483. In some embodiments, a VL sequence having at least 90%, 91%, 92%, 93%, 94%, 95%, 96%, 97%, 98%, or 99% identity contains substitutions (e.g., conservative substitutions), insertions, or deletions relative to the reference sequence, but an antibody or antigen-binding fragment thereof comprising that sequence retains the ability to bind to same antigen as the parent (e.g., cancer associated antigen). In some embodiments, a total of 1 to 10 amino acids have been substituted, inserted and/or deleted in the amino acid sequence SEQ ID NO: 483. In some embodiments, the substitutions, insertions, or deletions occur in regions outside the CDRs (e.g., in the FRs). Optionally, the antibody or antigen-binding fragment thereof comprises the VL sequence SEQ ID NO: 483, including one or more post-translational modifications of that sequence. In a particular embodiment, the VL comprises one, two or three CDRs selected from: a. CDR-L1, comprising the amino acid sequence SEQ ID NO: 1025, b. CDR-L2, comprising the amino acid sequence SEQ ID NO: 1567, and c. CDR-L3, comprising the amino acid sequence SEQ ID NO: 2109.

[2531] In one aspect, an antibody or antigen-binding fragment thereof is provided, wherein the antibody or antigen-binding fragment thereof comprises a VH as in any of the embodiments provided above, and a VL as in any of the embodiments provided above. In some embodiments, the antibody or antigen-binding fragment thereof comprises the VH amino acid sequence of SEQ ID NO: 212, and the VL amino acid sequence of SEQ ID NO: 483, optionally including post-translational modifications of those sequences.

### TPAN1005

[2532] In one aspect, the present disclosure provides an antibody or antigen-binding fragment thereof comprising at least one or both variable regions selected from: a. VH comprising the amino acid sequence of SEQ ID NO: 213 and b. VL comprising the amino acid sequence of SEQ ID NO: 484.

[2533] In one aspect, the present disclosure provides an antibody or antigen-binding fragment thereof comprising at least one, two, three, four, five, or six CDRs selected from: a. CDR-H1 comprising the amino acid sequence of SEQ ID NO: 755, b. CDR-H2 comprising the amino acid sequence of SEQ ID NO: 1297, c. CDR-H3 comprising the amino acid sequence of SEQ ID NO: 1839, d. CDR-L1 comprising the amino acid sequence of SEQ ID NO: 1026, e. CDR-L2 comprising the amino acid sequence of SEQ ID NO: 1568, and f. CDR-L3 comprising the amino acid sequence of SEQ ID NO: 2110.

[2534] In one aspect, the present disclosure provides an antibody or antigen-binding fragment thereof comprising a CDR-H3 comprising the amino acid sequence of SEQ ID NO: 1839, and a CDR-L3 comprising the amino acid sequence of SEQ ID NO: 2110.

[2535] In one aspect, the present disclosure provides an antibody or antigen-binding fragment thereof comprising at least one, at least two, or all three VH CDR sequences selected from: a. CDR-H1 comprising the amino acid sequence of SEQ ID NO: 755, b. CDR-H2 comprising the amino acid sequence of SEQ ID NO: 1297, c. CDR-H3 comprising the amino acid sequence of SEQ ID NO: 1839, and a VL comprising the amino acid sequence of SEQ ID NO: 484.

[2536] In one aspect, the present disclosure provides an antibody or antigen-binding fragment thereof comprising at least one, at least two, or all three VL CDR sequences selected from: a. CDR-L1 comprising the amino acid sequence of SEQ ID NO: 1026, b. CDR-L2 comprising the amino acid sequence of SEQ ID NO: 1568, c. CDR-L3 comprising the amino acid sequence of SEQ ID NO: 2110, and a VH comprising the amino acid sequence of SEQ ID NO: 213.

[2537] In one aspect, an antibody or antigen-binding fragment thereof is provided, wherein the antibody or antigen-binding fragment thereof comprises a heavy chain variable domain (VH) having at least 90%, 91%, 92%, 93%, 94%, 95%, 96%, 97%, 98%, 99%, or 100% sequence identity to the amino acid sequence SEQ ID NO: 213. In some embodiments, a VH sequence having at least 90%, 91%, 92%, 93%, 94%, 95%, 96%, 97%, 98%, or 99% identity contains substitutions (e.g., conservative substitutions), insertions, or deletions relative to the reference sequence, but an antibody or antigen-binding fragment thereof comprising that sequence retains the ability to bind to same antigen as of the parent (e.g., cancer associated antigen). In some embodiments, a total of 1 to 10 amino acids have been substituted, inserted and/or deleted in the amino acid sequence SEQ ID NO: 213. In some embodiments, substitutions, antigen-binding fragment thereof comprises the VH sequence SEQ ID NO: 213, including one or more post-translational modifications of that sequence. In a particular embodiment, the VH comprises one, two or three CDRs selected from: a. CDR-H1, comprising the amino acid sequence SEQ ID NO: 755, b. CDR-H2, comprising the amino acid sequence SEQ ID NO: 1297, and c. CDR-H3, comprising the amino acid sequence SEQ ID NO: 1839.

[2538] In one aspect, an antibody or antigen-binding fragment thereof is provided, wherein the antibody or antigen-binding fragment thereof comprises a light chain variable domain (VL) having at least 90%, 91%, 92%, 93%, 94%, 95%, 96%, 97%, 98%, 99%, or 100% sequence identity to the amino acid sequence SEQ ID NO: 484. In some embodiments, a VL sequence having at least 90%, 91%, 92%, 93%, 94%, 95%, 96%, 97%, 98%, or 99% identity contains substitutions (e.g., conservative substitutions), insertions, or deletions relative to the reference sequence, but an antibody or antigen-binding fragment thereof comprising that sequence retains the ability to bind to same antigen as the parent (e.g., cancer associated antigen). In some embodiments, a total of 1 to 10 amino acids have been substituted, inserted and/or deleted in the amino acid sequence SEQ ID NO: 484. In some embodiments, the substitutions, insertions, or deletions occur in regions outside the CDRs (e.g., in the FRs). Optionally, the antibody or antigen-binding fragment thereof comprises the VL sequence SEQ ID NO: 484, including one or more post-translational modifications of that sequence. In a particular embodiment, the VL comprises one, two or three CDRs selected from: a. CDR-L1, comprising the amino acid sequence SEQ ID NO: 1026, b. CDR-L2, comprising the amino acid sequence SEQ ID NO: 1568, and c. CDR-L3, comprising the amino acid sequence SEQ ID NO: 2110.

[2539] In one aspect, an antibody or antigen-binding fragment thereof is provided, wherein the antibody or antigen-binding fragment thereof comprises a VH as in any of the embodiments provided above, and a VL as in any of the embodiments provided above. In some embodiments, the antibody or antigen-binding fragment thereof comprises the VH amino acid sequence of SEQ ID NO: 213, and the VL amino acid sequence of SEQ ID NO: 484, optionally including post-translational modifications of those sequences.

### TPAN1006

[2540] In one aspect, the present disclosure provides an antibody or antigen-binding fragment thereof comprising at least one or both variable regions selected from: a. VH comprising the amino acid sequence of SEQ ID NO: 214 and b. VL comprising the amino acid sequence of SEQ ID NO: 485.

[2541] In one aspect, the present disclosure provides an antibody or antigen-binding fragment thereof comprising at least one, two, three, four, five, or six CDRs selected from: a. CDR-H1 comprising the amino acid sequence of SEQ ID NO: 756, b. CDR-H2 comprising the amino acid sequence of SEQ ID NO: 1298, c. CDR-H3 comprising the amino acid sequence of SEQ ID NO: 1840, d. CDR-L1 comprising the amino acid sequence of SEQ ID NO: 1027, e. CDR-L2 comprising the amino acid sequence of SEQ ID NO: 1569, and f. CDR-L3 comprising the amino acid sequence of SEQ ID NO: 2111.

[2542] In one aspect, the present disclosure provides an antibody or antigen-binding fragment thereof comprising a CDR-H3 comprising the amino acid sequence of SEQ ID NO: 1840, and a CDR-L3 comprising the amino acid sequence of SEQ ID NO: 2111.

[2543] In one aspect, the present disclosure provides an antibody or antigen-binding fragment thereof comprising at least one, at least two, or all three VH CDR sequences selected from: a. CDR-H1 comprising the amino acid sequence of SEQ ID NO: 756, b. CDR-H2 comprising the amino acid sequence of SEQ ID NO: 1298, c. CDR-H3 comprising the amino acid sequence of SEQ ID NO: 1840, and a VL comprising the amino acid sequence of SEQ ID NO: 485.

[2544] In one aspect, the present disclosure provides an antibody or antigen-binding fragment thereof comprising at least one, at least two, or all three VL CDR sequences selected from: a. CDR-L1 comprising the amino acid sequence of SEQ ID NO: 1027, b. CDR-L2 comprising the amino acid sequence of SEQ ID NO: 1569, c. CDR-L3 comprising the amino acid sequence of SEQ ID NO: 2111, and a VH comprising the amino acid sequence of SEQ ID NO: 214.

[2545] In one aspect, an antibody or antigen-binding fragment thereof is provided, wherein the antibody or antigen-binding fragment thereof comprises a heavy chain variable domain (VH) having at least 90%, 91%, 92%, 93%, 94%, 95%, 96%, 97%, 98%, 99%, or 100% sequence identity to the amino acid sequence SEQ ID NO: 214. In some embodiments, a VH sequence having at least 90%, 91%, 92%, 93%, 94%, 95%, 96%, 97%, 98%, or 99% identity contains substitutions (e.g., conservative substitutions), insertions, or deletions relative to the reference sequence, but an antibody or antigen-binding fragment thereof comprising that sequence retains the ability to bind to same antigen as of the parent (e.g., cancer associated antigen). In some embodiments, a total of 1 to 10 amino acids have been substituted, inserted and/or deleted in the amino acid sequence SEQ ID NO: 214. In some embodiments, substitutions, insertions, or deletions occur in regions outside the CDRs (e.g., in the FRs). Optionally, the antibody or antigen-binding fragment thereof comprises the VH sequence SEQ ID NO: 214, including one or more post-translational modifications of that sequence. In a particular embodiment, the VH comprises one, two or three CDRs selected from: a. CDR-H1, comprising the amino acid sequence SEQ ID NO: 756, b. CDR-H2, comprising the amino acid sequence SEQ ID NO: 1298, and c. CDR-H3, comprising the amino acid sequence SEQ ID NO: 1840.

[2546] In one aspect, an antibody or antigen-binding fragment thereof is provided, wherein the antibody or antigen-binding fragment thereof comprises a light chain variable domain (VL) having at least 90%, 91%, 92%, 93%, 94%, 95%, 96%, 97%, 98%, 99%, or 100% sequence identity to the amino acid sequence SEQ ID NO: 485. In some embodiments, a VL sequence having at least 90%, 91%, 92%, 93%, 94%, 95%, 96%, 97%, 98%, or 99% identity contains substitutions (e.g., conservative substitutions), insertions, or deletions relative to the reference sequence, but an antibody or antigen-binding fragment thereof comprising that sequence retains the ability to bind to same antigen as the parent (e.g., cancer associated antigen). In some embodiments, a total of 1 to 10 amino acids have been substituted, inserted and/or deleted in the amino acid sequence SEQ ID NO: 485. In some embodiments, the substitutions, insertions, or deletions occur in regions outside the CDRs (e.g., in the FRs). Optionally, the antibody or antigen-binding fragment thereof comprises the VL sequence SEQ ID NO: 485, including one or more post-translational modifications of that sequence. In a particular embodiment, the VL comprises one, two or three CDRs selected from: a. CDR-L1, comprising the amino acid sequence SEQ ID NO: 1027, b. CDR-L2, comprising the amino acid sequence SEQ ID NO: 1569, and c. CDR-L3, comprising the amino acid sequence SEQ ID NO: 2111.

[2547] In one aspect, an antibody or antigen-binding fragment thereof is provided, wherein the antibody or antigen-binding fragment thereof comprises a VH as in any of the embodiments provided above, and a VL as in any of the embodiments provided above. In some embodiments, the antibody or antigen-binding fragment thereof comprises the VH amino acid sequence of SEQ ID NO: 214, and the VL amino acid sequence of SEQ ID NO: 485, optionally including post-translational modifications of those sequences.

### TPAN1007

[2548] In one aspect, the present disclosure provides an antibody or antigen-binding fragment thereof comprising at least one or both variable regions selected from: a. VH comprising the amino acid sequence of SEQ ID NO: 215 and b. VL comprising the amino acid sequence of SEQ ID NO: 486.

[2549] In one aspect, the present disclosure provides an antibody or antigen-binding fragment thereof comprising at least one, two, three, four, five, or six CDRs selected from: a. CDR-H1 comprising the amino acid sequence of SEQ ID NO: 757, b. CDR-H2 comprising the amino acid sequence of SEQ ID NO: 1299, c. CDR-H3 comprising the amino acid sequence of SEQ ID NO: 1841, d. CDR-L1 comprising the amino acid sequence of SEQ ID NO: 1028, e. CDR-L2 comprising the amino acid sequence of SEQ ID NO: 1570, and f. CDR-L3 comprising the amino acid sequence of SEQ ID NO: 2112.

[2550] In one aspect, the present disclosure provides an antibody or antigen-binding fragment thereof comprising a CDR-H3 comprising the amino acid sequence of SEQ ID NO: 1841, and a CDR-L3 comprising the amino acid sequence of SEQ ID NO: 2112.

[2551] In one aspect, the present disclosure provides an antibody or antigen-binding fragment thereof comprising at least one, at least two, or all three VH CDR sequences selected from: a. CDR-H1 comprising the amino acid sequence of SEQ ID NO: 757, b. CDR-H2 comprising the amino acid sequence of SEQ ID NO: 1299, c. CDR-H3 comprising the amino acid sequence of SEQ ID NO: 1841, and a VL comprising the amino acid sequence of SEQ ID NO: 486.

[2552] In one aspect, the present disclosure provides an antibody or antigen-binding fragment thereof comprising at least one, at least two, or all three VL CDR sequences selected from: a. CDR-L1 comprising the amino acid sequence of SEQ ID NO: 1028, b. CDR-L2 comprising the amino acid sequence of SEQ ID NO: 1570, c. CDR-L3 comprising the amino acid sequence of SEQ ID NO: 2112, and a VH comprising the amino acid sequence of SEQ ID NO: 215.

[2553] In one aspect, an antibody or antigen-binding fragment thereof is provided, wherein the antibody or antigen-binding fragment thereof comprises a heavy chain variable domain (VH) having at least 90%, 91%, 92%, 93%, 94%, 95%, 96%, 97%, 98%, 99%, or 100% sequence identity to the amino acid sequence SEQ ID NO: 215. In some embodiments, a VH sequence having at least 90%, 91%, 92%, 93%, 94%, 95%, 96%, 97%, 98%, or 99% identity contains substitutions (e.g., conservative substitutions), insertions, or deletions relative to the reference sequence, but an antibody or antigen-binding fragment thereof comprising that sequence retains the ability to bind to same antigen as of the parent (e.g., cancer associated antigen). In some embodiments, a total of 1 to 10 amino acids have been substituted, inserted and/or deleted in the amino acid sequence SEQ ID NO: 215. In some embodiments, substitutions, insertions, or deletions occur in regions outside the CDRs (e.g., in the FRs). Optionally, the antibody or antigen-binding fragment thereof comprises the VH sequence SEQ ID NO: 215, including one or more post-translational modifications of that sequence. In a particular embodiment, the VH comprises one, two or three CDRs selected from: a. CDR-H1, comprising the amino acid sequence SEQ ID NO: 757, b. CDR-H2, comprising the amino acid sequence SEQ ID NO: 1299, and c. CDR-H3, comprising the amino acid sequence SEQ ID NO: 1841.

[2554] In one aspect, an antibody or antigen-binding fragment thereof is provided, wherein the antibody or antigen-binding fragment thereof comprises a light chain variable domain (VL) having at least 90%, 91%, 92%, 93%, 94%, 95%, 96%, 97%, 98%, 99%, or 100% sequence identity to the amino acid sequence SEQ ID NO: 486. In some embodiments, a VL sequence having at least 90%, 91%, 92%, 93%, 94%, 95%, 96%, 97%, 98%, or 99% identity contains substitutions (e.g., conservative substitutions), insertions, or deletions relative to the reference sequence, but an antibody or antigen-binding fragment thereof comprising that sequence retains the ability to bind to same antigen as the parent (e.g., cancer associated antigen). In some embodiments, a total of 1 to 10 amino acids have been substituted, inserted and/or deleted in the amino acid sequence SEQ ID NO: 486. In some embodiments, the substitutions, insertions, or deletions occur in regions outside the CDRs (e.g., in the FRs). Optionally, the antibody or antigen-binding fragment thereof comprises the VL sequence SEQ ID NO: 486, including one or more post-translational modifications of that sequence. In a particular embodiment, the VL comprises one, two or three CDRs selected from: a. CDR-L1, comprising the amino acid sequence SEQ ID NO: 1028, b. CDR-L2, comprising the amino acid sequence SEQ ID NO: 1570, and c. CDR-L3, comprising the amino acid sequence SEQ ID NO: 2112.

[2555] In one aspect, an antibody or antigen-binding fragment thereof is provided, wherein the antibody or antigen-binding fragment thereof comprises a VH as in any of the embodiments provided above, and a VL as in any of the embodiments provided above. In some embodiments, the antibody or antigen-binding fragment thereof comprises the VH amino acid sequence of SEQ ID NO: 215, and the VL amino acid sequence of SEQ ID NO: 486, optionally including post-translational modifications of those sequences.

### TPHE1001

[2556] In one aspect, the present disclosure provides an antibody or antigen-binding fragment thereof comprising at least one or both variable regions selected from: a. VH comprising the amino acid sequence of SEQ ID NO: 216 and b. VL comprising the amino acid sequence of SEQ ID NO: 487.

[2557] In one aspect, the present disclosure provides an antibody or antigen-binding fragment thereof comprising at least one, two, three, four, five, or six CDRs selected from: a. CDR-H1 comprising the amino acid sequence of SEQ ID NO: 758, b. CDR-H2 comprising the amino acid sequence of SEQ ID NO: 1300, c. CDR-H3 comprising the amino acid sequence of SEQ ID NO: 1842, d. CDR-L1 comprising the amino acid sequence of SEQ ID NO: 1029, e. CDR-L2 comprising the amino acid sequence of SEQ ID NO: 1571, and f. CDR-L3 comprising the amino acid sequence of SEQ ID NO: 2113.

[2558] In one aspect, the present disclosure provides an antibody or antigen-binding fragment thereof comprising a CDR-H3 comprising the amino acid sequence of SEQ ID NO: 1842, and a CDR-L3 comprising the amino acid sequence of SEQ ID NO: 2113.

[2559] In one aspect, the present disclosure provides an antibody or antigen-binding fragment thereof comprising at least one, at least two, or all three VH CDR sequences selected from: a. CDR-H1 comprising the amino acid sequence of SEQ ID NO: 758, b. CDR-H2 comprising the amino acid sequence of SEQ ID NO: 1300, c. CDR-H3 comprising the amino acid sequence of SEQ ID NO: 1842, and a VL comprising the amino acid sequence of SEQ ID NO: 487.

[2560] In one aspect, the present disclosure provides an antibody or antigen-binding fragment thereof comprising at least one, at least two, or all three VL CDR sequences selected from: a. CDR-L1 comprising the amino acid sequence of SEQ ID NO: 1029, b. CDR-L2 comprising the amino acid sequence of SEQ ID NO: 1571, c. CDR-L3 comprising the amino acid sequence of SEQ ID NO: 2113, and a VH comprising the amino acid sequence of SEQ ID NO: 216.

[2561] In one aspect, an antibody or antigen-binding fragment thereof is provided, wherein the antibody or antigen-binding fragment thereof comprises a heavy chain variable domain (VH) having at least 90%, 91%, 92%, 93%, 94%, 95%, 96%, 97%, 98%, 99%, or 100% sequence identity to the amino acid sequence SEQ ID NO: 216. In some embodiments, a VH sequence having at least 90%, 91%, 92%, 93%, 94%, 95%, 96%, 97%, 98%, or 99% identity contains substitutions (e.g., conservative substitutions), insertions, or deletions relative to the reference sequence, but an antibody or antigen-binding fragment thereof comprising that sequence retains the ability to bind to same antigen as of the parent (e.g., cancer associated antigen). In some embodiments, a total of 1 to 10 amino acids have been substituted, inserted and/or deleted in the amino acid sequence SEQ ID NO: 216. In some embodiments, substitutions, insertions, or deletions occur in regions outside the CDRs (e.g., in the FRs). Optionally, the antibody or antigen-binding fragment thereof comprises the VH sequence SEQ ID NO: 216, including one or more post-translational modifications of that sequence. In a particular embodiment, the VH comprises one, two or three CDRs selected from: a. CDR-H1, comprising the amino acid sequence SEQ ID NO: 758, b. CDR-H2, comprising the amino acid sequence SEQ ID NO: 1300, and c. CDR-H3, comprising the amino acid sequence SEQ ID NO: 1842.

[2562] In one aspect, an antibody or antigen-binding fragment thereof is provided, wherein the antibody or antigen-binding fragment thereof comprises a light chain variable domain (VL) having at least 90%, 91%, 92%, 93%, 94%, 95%, 96%, 97%, 98%, 99%, or 100% sequence identity to the amino acid sequence SEQ ID NO: 487. In some embodiments, a VL sequence having at least 90%, 91%, 92%, 93%, 94%, 95%, 96%, 97%, 98%, or 99% identity contains substitutions (e.g., conservative substitutions), insertions, or deletions relative to the reference sequence, but an antibody or antigen-binding fragment thereof comprising that sequence retains the ability to bind to same antigen as the parent (e.g., cancer associated antigen). In some embodiments, a total of 1 to 10 amino acids have been substituted, inserted and/or deleted in the amino acid sequence SEQ ID NO: 487. In some embodiments, the substitutions, antigen-binding fragment thereof comprises the VL sequence SEQ ID NO: 487, including one or more post-translational modifications of that sequence. In a particular embodiment, the VL comprises one, two or three CDRs selected from: a. CDR-L1, comprising the amino acid sequence SEQ ID NO: 1029, b. CDR-L2, comprising the amino acid sequence SEQ ID NO: 1571, and c. CDR-L3, comprising the amino acid sequence SEQ ID NO: 2113.

[2563] In one aspect, an antibody or antigen-binding fragment thereof is provided, wherein the antibody or antigen-binding fragment thereof comprises a VH as in any of the embodiments provided above, and a VL as in any of the embodiments provided above. In some embodiments, the antibody or antigen-binding fragment thereof comprises the VH amino acid sequence of SEQ ID NO: 216, and the VL amino acid sequence of SEQ ID NO: 487, optionally including post-translational modifications of those sequences.

### TPRO1001

[2564] In one aspect, the present disclosure provides an antibody or antigen-binding fragment thereof comprising at least one or both variable regions selected from: a. VH comprising the amino acid sequence of SEQ ID NO: 217 and b. VL comprising the amino acid sequence of SEQ ID NO: 488.

[2565] In one aspect, the present disclosure provides an antibody or antigen-binding fragment thereof comprising at least one, two, three, four, five, or six CDRs selected from: a. CDR-H1 comprising the amino acid sequence of SEQ ID NO: 759, b. CDR-H2 comprising the amino acid sequence of SEQ ID NO: 1301, c. CDR-H3 comprising the amino acid sequence of SEQ ID NO: 1843, d. CDR-L1 comprising the amino acid sequence of SEQ ID NO: 1030, e. CDR-L2 comprising the amino acid sequence of SEQ ID NO: 1572, and f. CDR-L3 comprising the amino acid sequence of SEQ ID NO: 2114.

[2566] In one aspect, the present disclosure provides an antibody or antigen-binding fragment thereof comprising a CDR-H3 comprising the amino acid sequence of SEQ ID NO: 1843, and a CDR-L3 comprising the amino acid sequence of SEQ ID NO: 2114.

[2567] In one aspect, the present disclosure provides an antibody or antigen-binding fragment thereof comprising at least one, at least two, or all three VH CDR sequences selected from: a. CDR-H1 comprising the amino acid sequence of SEQ ID NO: 759, b. CDR-H2 comprising the amino acid sequence of SEQ ID NO: 1301, c. CDR-H3 comprising the amino acid sequence of SEQ ID NO: 1843, and a VL comprising the amino acid sequence of SEQ ID NO: 488.

[2568] In one aspect, the present disclosure provides an antibody or antigen-binding fragment thereof comprising at least one, at least two, or all three VL CDR sequences selected from: a. CDR-L1 comprising the amino acid sequence of SEQ ID NO: 1030, b. CDR-L2 comprising the amino acid sequence of SEQ ID NO: 1572, c. CDR-L3 comprising the amino acid sequence of SEQ ID NO: 2114, and a VH comprising the amino acid sequence of SEQ ID NO: 217.

[2569] In one aspect, an antibody or antigen-binding fragment thereof is provided, wherein the antibody or antigen-binding fragment thereof comprises a heavy chain variable domain (VH) having at least 90%, 91%, 92%, 93%, 94%, 95%, 96%, 97%, 98%, 99%, or 100% sequence identity to the amino acid sequence SEQ ID NO: 217. In some embodiments, a VH sequence having at least 90%, 91%, 92%, 93%, 94%, 95%, 96%, 97%, 98%, or 99% identity contains substitutions (e.g., conservative substitutions), thereof comprising that sequence retains the ability to bind to same antigen as of the parent (e.g., cancer associated antigen). In some embodiments, a total of 1 to 10 amino acids have been substituted, inserted and/or deleted in the amino acid sequence SEQ ID NO: 217. In some embodiments, substitutions, insertions, or deletions occur in regions outside the CDRs (e.g., in the FRs). Optionally, the antibody or antigen-binding fragment thereof comprises the VH sequence SEQ ID NO: 217, including one or more post-translational modifications of that sequence. In a particular embodiment, the VH comprises one, two or three CDRs selected from: a. CDR-H1, comprising the amino acid sequence SEQ ID NO: 759, b. CDR-H2, comprising the amino acid sequence SEQ ID NO: 1301, and c. CDR-H3, comprising the amino acid sequence SEQ ID NO: 1843.

[2570] In one aspect, an antibody or antigen-binding fragment thereof is provided, wherein the antibody or antigen-binding fragment thereof comprises a light chain variable domain (VL) having at least 90%, 91%, 92%, 93%, 94%, 95%, 96%, 97%, 98%, 99%, or 100% sequence identity to the amino acid sequence SEQ ID NO: 488. In some embodiments, a VL sequence having at least 90%, 91%, 92%, 93%, 94%, 95%, 96%, 97%, 98%, or 99% identity contains substitutions (e.g., conservative substitutions), insertions, or deletions relative to the reference sequence, but an antibody or antigen-binding fragment thereof comprising that sequence retains the ability to bind to same antigen as the parent (e.g., cancer associated antigen). In some embodiments, a total of 1 to 10 amino acids have been substituted, inserted and/or deleted in the amino acid sequence SEQ ID NO: 488. In some embodiments, the substitutions, insertions, or deletions occur in regions outside the CDRs (e.g., in the FRs). Optionally, the antibody or antigen-binding fragment thereof comprises the VL sequence SEQ ID NO: 488, including one or more post-translational modifications of that sequence. In a particular embodiment, the VL comprises one, two or three CDRs selected from: a. CDR-L1, comprising the amino acid sequence SEQ ID NO: 1030, b. CDR-L2, comprising the amino acid sequence SEQ ID NO: 1572, and c. CDR-L3, comprising the amino acid sequence SEQ ID NO: 2114.

[2571] In one aspect, an antibody or antigen-binding fragment thereof is provided, wherein the antibody or antigen-binding fragment thereof comprises a VH as in any of the embodiments provided above, and a VL as in any of the embodiments provided above. In some embodiments, the antibody or antigen-binding fragment thereof comprises the VH amino acid sequence of SEQ ID NO: 217, and the VL amino acid sequence of SEQ ID NO: 488, optionally including post-translational modifications of those sequences.

### TPRO1002

[2572] In one aspect, the present disclosure provides an antibody or antigen-binding fragment thereof comprising at least one or both variable regions selected from: a. VH comprising the amino acid sequence of SEQ ID NO: 218 and b. VL comprising the amino acid sequence of SEQ ID NO: 489.

[2573] In one aspect, the present disclosure provides an antibody or antigen-binding fragment thereof comprising at least one, two, three, four, five, or six CDRs selected from: a. CDR-H1 comprising the amino acid sequence of SEQ ID NO: 760, b. CDR-H2 comprising the amino acid sequence of SEQ ID NO: 1302, c. CDR-H3 comprising the amino acid sequence of SEQ ID NO: 1844, d. CDR-L1 comprising the amino acid sequence of SEQ ID NO: 1031, e. CDR-L2 comprising the amino acid sequence of SEQ ID NO: 1573, f. CDR-L3 comprising the amino acid sequence of SEQ ID NO: 2115.

[2574] In one aspect, the present disclosure provides an antibody or antigen-binding fragment thereof comprising a CDR-H3 comprising the amino acid sequence of SEQ ID NO: 1844, and a CDR-L3 comprising the amino acid sequence of SEQ ID NO: 2115.

[2575] In one aspect, the present disclosure provides an antibody or antigen-binding fragment thereof comprising at least one, at least two, or all three VH CDR sequences selected from: a. CDR-H1 comprising the amino acid sequence of SEQ ID NO: 760, b. CDR-H2 comprising the amino acid sequence of SEQ ID NO: 1302, c. CDR-H3 comprising the amino acid sequence of SEQ ID NO: 1844, and d. VL comprising the amino acid sequence of SEQ ID NO: 489.

[2576] In one aspect, the present disclosure provides an antibody or antigen-binding fragment thereof comprising at least one, at least two, or all three VL CDR sequences selected from: a. CDR-L1 comprising the amino acid sequence of SEQ ID NO: 1031, b. CDR-L2 comprising the amino acid sequence of SEQ ID NO: 1573, c. CDR-L3 comprising the amino acid sequence of SEQ ID NO: 2115, and a VH comprising the amino acid sequence of SEQ ID NO: 218.

[2577] In one aspect, an antibody or antigen-binding fragment thereof is provided, wherein the antibody or antigen-binding fragment thereof comprises a heavy chain variable domain (VH) having at least 90%, 91%, 92%, 93%, 94%, 95%, 96%, 97%, 98%, 99%, or 100% sequence identity to the amino acid sequence SEQ ID NO: 218. In some embodiments, a VH sequence having at least 90%, 91%, 92%, 93%, 94%, 95%, 96%, 97%, 98%, or 99% identity contains substitutions (e.g., conservative substitutions), insertions, or deletions relative to the reference sequence, but an antibody or antigen-binding fragment thereof comprising that sequence retains the ability to bind to same antigen as of the parent (e.g., cancer associated antigen). In some embodiments, a total of 1 to 10 amino acids have been substituted, inserted and/or deleted in the amino acid sequence SEQ ID NO: 218. In some embodiments, substitutions, insertions, or deletions occur in regions outside the CDRs (e.g., in the FRs). Optionally, the antibody or antigen-binding fragment thereof comprises the VH sequence SEQ ID NO: 218, including one or more post-translational modifications of that sequence. In a particular embodiment, the VH comprises one, two or three CDRs selected from: a. CDR-H1, comprising the amino acid sequence SEQ ID NO: 760, b. CDR-H2, comprising the amino acid sequence SEQ ID NO: 1302, and c. CDR-H3, comprising the amino acid sequence SEQ ID NO: 1844.

[2578] In one aspect, an antibody or antigen-binding fragment thereof is provided, wherein the antibody or antigen-binding fragment thereof comprises a light chain variable domain (VL) having at least 90%, 91%, 92%, 93%, 94%, 95%, 96%, 97%, 98%, 99%, or 100% sequence identity to the amino acid sequence SEQ ID NO: 489. In some embodiments, a VL sequence having at least 90%, 91%, 92%, 93%, 94%, 95%, 96%, 97%, 98%, or 99% identity contains substitutions (e.g., conservative substitutions), insertions, or deletions relative to the reference sequence, but an antibody or antigen-binding fragment thereof comprising that sequence retains the ability to bind to same antigen as the parent (e.g., cancer associated antigen). In some embodiments, a total of 1 to 10 amino acids have been substituted, inserted and/or deleted in the amino acid sequence SEQ ID NO: 489. In some embodiments, the substitutions, insertions, or deletions occur in regions outside the CDRs (e.g., in the FRs). Optionally, the antibody or antigen-binding fragment thereof comprises the VL sequence SEQ ID NO: 489, including one or more post-translational modifications of that sequence. In a particular embodiment, the VL comprises one, two or three CDRs selected from: a. CDR-L1, comprising the amino acid sequence SEQ ID NO: 1031, b. CDR-L2, comprising the amino acid sequence SEQ ID NO: 1573, and c. CDR-L3, comprising the amino acid sequence SEQ ID NO: 2115.

[2579] In one aspect, an antibody or antigen-binding fragment thereof is provided, wherein the antibody or antigen-binding fragment thereof comprises a VH as in any of the embodiments provided above, and a VL as in any of the embodiments provided above. In some embodiments, the antibody or antigen-binding fragment thereof comprises the VH amino acid sequence of SEQ ID NO: 218, and the VL amino acid sequence of SEQ ID NO: 489, optionally including post-translational modifications of those sequences.

### TPRO1003

[2580] In one aspect, the present disclosure provides an antibody or antigen-binding fragment thereof comprising at least one or both variable regions selected from: a. VH comprising the amino acid sequence of SEQ ID NO: 219 and b. VL comprising the amino acid sequence of SEQ ID NO: 490.

[2581] In one aspect, the present disclosure provides an antibody or antigen-binding fragment thereof comprising at least one, two, three, four, five, or six CDRs selected from: a. CDR-H1 comprising the amino acid sequence of SEQ ID NO: 761, b. CDR-H2 comprising the amino acid sequence of SEQ ID NO: 1303, c. CDR-H3 comprising the amino acid sequence of SEQ ID NO: 1845, d. CDR-L1 comprising the amino acid sequence of SEQ ID NO: 1032, e. CDR-L2 comprising the amino acid sequence of SEQ ID NO: 1574, and f. CDR-L3 comprising the amino acid sequence of SEQ ID NO: 2116.

[2582] In one aspect, the present disclosure provides an antibody or antigen-binding fragment thereof comprising a CDR-H3 comprising the amino acid sequence of SEQ ID NO: 1845, and a CDR-L3 comprising the amino acid sequence of SEQ ID NO: 2116.

[2583] In one aspect, the present disclosure provides an antibody or antigen-binding fragment thereof comprising at least one, at least two, or all three VH CDR sequences selected from: a. CDR-H1 comprising the amino acid sequence of SEQ ID NO: 761, b. CDR-H2 comprising the amino acid sequence of SEQ ID NO: 1303, c. CDR-H3 comprising the amino acid sequence of SEQ ID NO: 1845, and a VL comprising the amino acid sequence of SEQ ID NO: 490.

[2584] In one aspect, the present disclosure provides an antibody or antigen-binding fragment thereof comprising at least one, at least two, or all three VL CDR sequences selected from: a. CDR-L1 comprising the amino acid sequence of SEQ ID NO: 1032, b. CDR-L2 comprising the amino acid sequence of SEQ ID NO: 1574, c. CDR-L3 comprising the amino acid sequence of SEQ ID NO: 2116, and a VH comprising the amino acid sequence of SEQ ID NO: 219.

[2585] In one aspect, an antibody or antigen-binding fragment thereof is provided, wherein the antibody or antigen-binding fragment thereof comprises a heavy chain variable domain (VH) having at least 90%, 91%, 92%, 93%, 94%, 95%, 96%, 97%, 98%, 99%, or 100% sequence identity to the amino acid sequence SEQ ID NO: 219. In some embodiments, a VH sequence having at least 90%, 91%, 92%, 93%, 94%, 95%, 96%, 97%, 98%, or 99% identity contains substitutions (e.g., conservative substitutions), insertions, or deletions relative to the reference sequence, but an antibody or antigen-binding fragment thereof comprising that sequence retains the ability to bind to same antigen as of the parent (e.g., cancer associated antigen). In some embodiments, a total of 1 to 10 amino acids have been substituted, inserted and/or deleted in the amino acid sequence SEQ ID NO: 219. In some embodiments, substitutions, insertions, or deletions occur in regions outside the CDRs (e.g., in the FRs). Optionally, the antibody or antigen-binding fragment thereof comprises the VH sequence SEQ ID NO: 219, including one or more post-translational modifications of that sequence. In a particular embodiment, the VH comprises one, two or three CDRs selected from: a. CDR-H1, comprising the amino acid sequence SEQ ID NO: 761, b. CDR-H2, comprising the amino acid sequence SEQ ID NO: 1303, and c. CDR-H3, comprising the amino acid sequence SEQ ID NO: 1845.

[2586] In one aspect, an antibody or antigen-binding fragment thereof is provided, wherein the antibody or antigen-binding fragment thereof comprises a light chain variable domain (VL) having at least 90%, 91%, 92%, 93%, 94%, 95%, 96%, 97%, 98%, 99%, or 100% sequence identity to the amino acid sequence SEQ ID NO: 490. In some embodiments, a VL sequence having at least 90%, 91%, 92%, 93%, 94%, 95%, 96%, 97%, 98%, or 99% identity contains substitutions (e.g., conservative substitutions), insertions, or deletions relative to the reference sequence, but an antibody or antigen-binding fragment thereof comprising that sequence retains the ability to bind to same antigen as the parent (e.g., cancer associated antigen). In some embodiments, a total of 1 to 10 amino acids have been substituted, inserted and/or deleted in the amino acid sequence SEQ ID NO: 490. In some embodiments, the substitutions, insertions, or deletions occur in regions outside the CDRs (e.g., in the FRs). Optionally, the antibody or antigen-binding fragment thereof comprises the VL sequence SEQ ID NO: 490, including one or more post-translational modifications of that sequence. In a particular embodiment, the VL comprises one, two or three CDRs selected from: a. CDR-L1, comprising the amino acid sequence SEQ ID NO: 1032, b. CDR-L2, comprising the amino acid sequence SEQ ID NO: 1574, and c. CDR-L3, comprising the amino acid sequence SEQ ID NO: 2116.

[2587] In one aspect, an antibody or antigen-binding fragment thereof is provided, wherein the antibody or antigen-binding fragment thereof comprises a VH as in any of the embodiments provided above, and a VL as in any of the embodiments provided above. In some embodiments, the antibody or antigen-binding fragment thereof comprises the VH amino acid sequence of SEQ ID NO: 219, and the VL amino acid sequence of SEQ ID NO: 490, optionally including post-translational modifications of those sequences.

### TREC1001

[2588] In one aspect, the present disclosure provides an antibody or antigen-binding fragment thereof comprising at least one or both variable regions selected from: a. VH comprising the amino acid sequence of SEQ ID NO: 220 and b. VL comprising the amino acid sequence of SEQ ID NO: 491.

[2589] In one aspect, the present disclosure provides an antibody or antigen-binding fragment thereof comprising at least one, two, three, four, five, or six CDRs selected from: a. CDR-H1 comprising the amino acid sequence of SEQ ID NO: 762, b. CDR-H2 comprising the amino acid sequence of SEQ ID NO: 1304, c. CDR-H3 comprising the amino acid sequence of SEQ ID NO: 1846, d. CDR-L1 comprising the amino acid sequence of SEQ ID NO: 1033, e. CDR-L2 comprising the amino acid sequence of SEQ ID NO: 1575, and f. CDR-L3 comprising the amino acid sequence of SEQ ID NO: 2117.

[2590] In one aspect, the present disclosure provides an antibody or antigen-binding fragment thereof comprising a CDR-H3 comprising the amino acid sequence of SEQ ID NO: 1846, and a CDR-L3 comprising the amino acid sequence of SEQ ID NO: 2117.

[2591] In one aspect, the present disclosure provides an antibody or antigen-binding fragment thereof comprising at least one, at least two, or all three VH CDR sequences selected from: a. CDR-H1 comprising the amino acid sequence of SEQ ID NO: 762, b. CDR-H2 comprising the amino acid sequence of SEQ ID NO: 1304, c. CDR-H3 comprising the amino acid sequence of SEQ ID NO: 1846, and a VL comprising the amino acid sequence of SEQ ID NO: 491.

[2592] In one aspect, the present disclosure provides an antibody or antigen-binding fragment thereof comprising at least one, at least two, or all three VL CDR sequences selected from: a. CDR-L1 comprising the amino acid sequence of SEQ ID NO: 1033, b. CDR-L2 comprising the amino acid sequence of SEQ ID NO: 1575, c. CDR-L3 comprising the amino acid sequence of SEQ ID NO: 2117, and a VH comprising the amino acid sequence of SEQ ID NO: 220.

[2593] In one aspect, an antibody or antigen-binding fragment thereof is provided, wherein the antibody or antigen-binding fragment thereof comprises a heavy chain variable domain (VH) having at least 90%, 91%, 92%, 93%, 94%, 95%, 96%, 97%, 98%, 99%, or 100% sequence identity to the amino acid sequence SEQ ID NO: 220. In some embodiments, a VH sequence having at least 90%, 91%, 92%, 93%, 94%, 95%, 96%, 97%, 98%, or 99% identity contains substitutions (e.g., conservative substitutions), insertions, or deletions relative to the reference sequence, but an antibody or antigen-binding fragment thereof comprising that sequence retains the ability to bind to same antigen as of the parent (e.g., cancer associated antigen). In some embodiments, a total of 1 to 10 amino acids have been substituted, inserted and/or deleted in the amino acid sequence SEQ ID NO: 220. In some embodiments, substitutions, insertions, or deletions occur in regions outside the CDRs (e.g., in the FRs). Optionally, the antibody or antigen-binding fragment thereof comprises the VH sequence SEQ ID NO: 220, including one or more post-translational modifications of that sequence. In a particular embodiment, the VH comprises one, two or three CDRs selected from: a. CDR-H1, comprising the amino acid sequence SEQ ID NO: 762, b. CDR-H2, comprising the amino acid sequence SEQ ID NO: 1304, and c. CDR-H3, comprising the amino acid sequence SEQ ID NO: 1846.

[2594] In one aspect, an antibody or antigen-binding fragment thereof is provided, wherein the antibody or antigen-binding fragment thereof comprises a light chain variable domain (VL) having at least 90%, 91%, 92%, 93%, 94%, 95%, 96%, 97%, 98%, 99%, or 100% sequence identity to the amino acid sequence SEQ ID NO: 491. In some embodiments, a VL sequence having at least 90%, 91%, 92%, 93%, 94%, 95%, 96%, 97%, 98%, or 99% identity contains substitutions (e.g., conservative substitutions), thereof comprising that sequence retains the ability to bind to same antigen as the parent (e.g., cancer associated antigen). In some embodiments, a total of 1 to 10 amino acids have been substituted, inserted and/or deleted in the amino acid sequence SEQ ID NO: 491. In some embodiments, the substitutions, insertions, or deletions occur in regions outside the CDRs (e.g., in the FRs). Optionally, the antibody or antigen-binding fragment thereof comprises the VL sequence SEQ ID NO: 491, including one or more post-translational modifications of that sequence. In a particular embodiment, the VL comprises one, two or three CDRs selected from: a. CDR-L1, comprising the amino acid sequence SEQ ID NO: 1033, b. CDR-L2, comprising the amino acid sequence SEQ ID NO: 1575, and c. CDR-L3, comprising the amino acid sequence SEQ ID NO: 2117.

[2595] In one aspect, an antibody or antigen-binding fragment thereof is provided, wherein the antibody or antigen-binding fragment thereof comprises a VH as in any of the embodiments provided above, and a VL as in any of the embodiments provided above. In some embodiments, the antibody or antigen-binding fragment thereof comprises the VH amino acid sequence of SEQ ID NO: 220, and the VL amino acid sequence of SEQ ID NO: 491, optionally including post-translational modifications of those sequences.

### TREC1002

[2596] In one aspect, the present disclosure provides an antibody or antigen-binding fragment thereof comprising at least one or both variable regions selected from: a. VH comprising the amino acid sequence of SEQ ID NO: 221 and b. VL comprising the amino acid sequence of SEQ ID NO: 492.

[2597] In one aspect, the present disclosure provides an antibody or antigen-binding fragment thereof comprising at least one, two, three, four, five, or six CDRs selected from: a. CDR-H1 comprising the amino acid sequence of SEQ ID NO: 763, b. CDR-H2 comprising the amino acid sequence of SEQ ID NO: 1305, c. CDR-H3 comprising the amino acid sequence of SEQ ID NO: 1847, d. CDR-L1 comprising the amino acid sequence of SEQ ID NO: 1034, e. CDR-L2 comprising the amino acid sequence of SEQ ID NO: 1576, and f. CDR-L3 comprising the amino acid sequence of SEQ ID NO: 2118.

[2598] In one aspect, the present disclosure provides an antibody or antigen-binding fragment thereof comprising a CDR-H3 comprising the amino acid sequence of SEQ ID NO: 1847, and a CDR-L3 comprising the amino acid sequence of SEQ ID NO: 2118.

[2599] In one aspect, the present disclosure provides an antibody or antigen-binding fragment thereof comprising at least one, at least two, or all three VH CDR sequences selected from: a. CDR-H1 comprising the amino acid sequence of SEQ ID NO: 763, b. CDR-H2 comprising the amino acid sequence of SEQ ID NO: 1305, c. CDR-H3 comprising the amino acid sequence of SEQ ID NO: 1847, and d. VL comprising the amino acid sequence of SEQ ID NO: 492.

[2600] In one aspect, the present disclosure provides an antibody or antigen-binding fragment thereof comprising at least one, at least two, or all three VL CDR sequences selected from: a. CDR-L1 comprising the amino acid sequence of SEQ ID NO: 1034, b. CDR-L2 comprising the amino acid sequence of SEQ ID NO: 1576, c. CDR-L3 comprising the amino acid sequence of SEQ ID NO: 2118, and a VH comprising the amino acid sequence of SEQ ID NO: 221.

[2601] In one aspect, an antibody or antigen-binding fragment thereof is provided, wherein the antibody or antigen-binding fragment thereof comprises a heavy chain variable domain (VH) having at least 90%, 91%, 92%, 93%, 94%, 95%, 96%, 97%, 98%, 99%, or 100% sequence identity to the amino acid sequence SEQ ID NO: 221. In some embodiments, a VH sequence having at least 90%, 91%, 92%, 93%, 94%, 95%, 96%, 97%, 98%, or 99% identity contains substitutions (e.g., conservative substitutions), insertions, or deletions relative to the reference sequence, but an antibody or antigen-binding fragment thereof comprising that sequence retains the ability to bind to same antigen as of the parent (e.g., cancer associated antigen). In some embodiments, a total of 1 to 10 amino acids have been substituted, inserted and/or deleted in the amino acid sequence SEQ ID NO: 221. In some embodiments, substitutions, insertions, or deletions occur in regions outside the CDRs (e.g., in the FRs). Optionally, the antibody or antigen-binding fragment thereof comprises the VH sequence SEQ ID NO: 221, including one or more post-translational modifications of that sequence. In a particular embodiment, the VH comprises one, two or three CDRs selected from: a. CDR-H1, comprising the amino acid sequence SEQ ID NO: 763, b. CDR-H2, comprising the amino acid sequence SEQ ID NO: 1305, and c. CDR-H3, comprising the amino acid sequence SEQ ID NO: 1847.

[2602] In one aspect, an antibody or antigen-binding fragment thereof is provided, wherein the antibody or antigen-binding fragment thereof comprises a light chain variable domain (VL) having at least 90%, 91%, 92%, 93%, 94%, 95%, 96%, 97%, 98%, 99%, or 100% sequence identity to the amino acid sequence SEQ ID NO: 492. In some embodiments, a VL sequence having at least 90%, 91%, 92%, 93%, 94%, 95%, 96%, 97%, 98%, or 99% identity contains substitutions (e.g., conservative substitutions), insertions, or deletions relative to the reference sequence, but an antibody or antigen-binding fragment thereof comprising that sequence retains the ability to bind to same antigen as the parent (e.g., cancer associated antigen). In some embodiments, a total of 1 to 10 amino acids have been substituted, inserted and/or deleted in the amino acid sequence SEQ ID NO: 492. In some embodiments, the substitutions, insertions, or deletions occur in regions outside the CDRs (e.g., in the FRs). Optionally, the antibody or antigen-binding fragment thereof comprises the VL sequence SEQ ID NO: 492, including one or more post-translational modifications of that sequence. In a particular embodiment, the VL comprises one, two or three CDRs selected from: a. CDR-L1, comprising the amino acid sequence SEQ ID NO: 1034, b. CDR-L2, comprising the amino acid sequence SEQ ID NO: 1576, and c. CDR-L3, comprising the amino acid sequence SEQ ID NO: 2118.

[2603] In one aspect, an antibody or antigen-binding fragment thereof is provided, wherein the antibody or antigen-binding fragment thereof comprises a VH as in any of the embodiments provided above, and a VL as in any of the embodiments provided above. In some embodiments, the antibody or antigen-binding fragment thereof comprises the VH amino acid sequence of SEQ ID NO: 221, and the VL amino acid sequence of SEQ ID NO: 492, optionally including post-translational modifications of those sequences.

### TREC1003

[2604] In one aspect, the present disclosure provides an antibody or antigen-binding fragment thereof comprising at least one or both variable regions selected from: a. VH comprising the amino acid sequence of SEQ ID NO: 222 and b. VL comprising the amino acid sequence of SEQ ID NO: 493.

[2605] In one aspect, the present disclosure provides an antibody or antigen-binding fragment thereof comprising at least one, two, three, four, five, or six CDRs selected from: a. CDR-H1 comprising the amino acid sequence of SEQ ID NO: 764, b. CDR-H2 comprising the amino acid sequence of SEQ ID NO: 1306, c. CDR-H3 comprising the amino acid sequence of SEQ ID NO: 1848, d. CDR-L1 comprising the amino acid sequence of SEQ ID NO: 1035, e. CDR-L2 comprising the amino acid sequence of SEQ ID NO: 1577, and f. CDR-L3 comprising the amino acid sequence of SEQ ID NO: 2119.

[2606] In one aspect, the present disclosure provides an antibody or antigen-binding fragment thereof comprising a CDR-H3 comprising the amino acid sequence of SEQ ID NO: 1848, and a CDR-L3 comprising the amino acid sequence of SEQ ID NO: 2119.

[2607] In one aspect, the present disclosure provides an antibody or antigen-binding fragment thereof comprising at least one, at least two, or all three VH CDR sequences selected from: a. CDR-H1 comprising the amino acid sequence of SEQ ID NO: 764, b. CDR-H2 comprising the amino acid sequence of SEQ ID NO: 1306, c. CDR-H3 comprising the amino acid sequence of SEQ ID NO: 1848, and a VL comprising the amino acid sequence of SEQ ID NO: 493.

[2608] In one aspect, the present disclosure provides an antibody or antigen-binding fragment thereof comprising at least one, at least two, or all three VL CDR sequences selected from: a. CDR-L1 comprising the amino acid sequence of SEQ ID NO: 1035, b. CDR-L2 comprising the amino acid sequence of SEQ ID NO: 1577, c. CDR-L3 comprising the amino acid sequence of SEQ ID NO: 2119, and a VH comprising the amino acid sequence of SEQ ID NO: 222.

[2609] In one aspect, an antibody or antigen-binding fragment thereof is provided, wherein the antibody or antigen-binding fragment thereof comprises a heavy chain variable domain (VH) having at least 90%, 91%, 92%, 93%, 94%, 95%, 96%, 97%, 98%, 99%, or 100% sequence identity to the amino acid sequence SEQ ID NO: 222. In some embodiments, a VH sequence having at least 90%, 91%, 92%, 93%, 94%, 95%, 96%, 97%, 98%, or 99% identity contains substitutions (e.g., conservative substitutions), insertions, or deletions relative to the reference sequence, but an antibody or antigen-binding fragment thereof comprising that sequence retains the ability to bind to same antigen as of the parent (e.g., cancer associated antigen). In some embodiments, a total of 1 to 10 amino acids have been substituted, inserted and/or deleted in the amino acid sequence SEQ ID NO: 222. In some embodiments, substitutions, insertions, or deletions occur in regions outside the CDRs (e.g., in the FRs). Optionally, the antibody or antigen-binding fragment thereof comprises the VH sequence SEQ ID NO: 222, including one or more post-translational modifications of that sequence. In a particular embodiment, the VH comprises one, two or three CDRs selected from: a. CDR-H1, comprising the amino acid sequence SEQ ID NO: 764, b. CDR-H2, comprising the amino acid sequence SEQ ID NO: 1306, and c. CDR-H3, comprising the amino acid sequence SEQ ID NO: 1848.

[2610] In one aspect, an antibody or antigen-binding fragment thereof is provided, wherein the antibody or antigen-binding fragment thereof comprises a light chain variable domain (VL) having at least 90%, 91%, 92%, 93%, 94%, 95%, 96%, 97%, 98%, 99%, or 100% sequence identity to the amino acid sequence SEQ ID NO: 493. In some embodiments, a VL sequence having at least 90%, 91%, 92%, 93%, 94%, 95%, 96%, 97%, 98%, or 99% identity contains substitutions (e.g., conservative substitutions), insertions, or deletions relative to the reference sequence, but an antibody or antigen-binding fragment thereof comprising that sequence retains the ability to bind to same antigen as the parent (e.g., cancer associated antigen). In some embodiments, a total of 1 to 10 amino acids have been substituted, inserted and/or deleted in the amino acid sequence SEQ ID NO: 493. In some embodiments, the substitutions, insertions, or deletions occur in regions outside the CDRs (e.g., in the FRs). Optionally, the antibody or antigen-binding fragment thereof comprises the VL sequence SEQ ID NO: 493, including one or more post-translational modifications of that sequence. In a particular embodiment, the VL comprises one, two or three CDRs selected from: a. CDR-L1, comprising the amino acid sequence SEQ ID NO: 1035, b. CDR-L2, comprising the amino acid sequence SEQ ID NO: 1577, and c. CDR-L3, comprising the amino acid sequence SEQ ID NO: 2119.

[2611] In one aspect, an antibody or antigen-binding fragment thereof is provided, wherein the antibody or antigen-binding fragment thereof comprises a VH as in any of the embodiments provided above, and a VL as in any of the embodiments provided above. In some embodiments, the antibody or antigen-binding fragment thereof comprises the VH amino acid sequence of SEQ ID NO: 222, and the VL amino acid sequence of SEQ ID NO: 493, optionally including post-translational modifications of those sequences.

### TSAR1001

[2612] In one aspect, the present disclosure provides an antibody or antigen-binding fragment thereof comprising at least one or both variable regions selected from: a. VH comprising the amino acid sequence of SEQ ID NO: 223 and b. VL comprising the amino acid sequence of SEQ ID NO: 494.

[2613] In one aspect, the present disclosure provides an antibody or antigen-binding fragment thereof comprising at least one, two, three, four, five, or six CDRs selected from: a. CDR-H1 comprising the amino acid sequence of SEQ ID NO: 765, b. CDR-H2 comprising the amino acid sequence of SEQ ID NO: 1307, c. CDR-H3 comprising the amino acid sequence of SEQ ID NO: 1849, d. CDR-L1 comprising the amino acid sequence of SEQ ID NO: 1036, e. CDR-L2 comprising the amino acid sequence of SEQ ID NO: 1578, and f. CDR-L3 comprising the amino acid sequence of SEQ ID NO: 2120.

[2614] In one aspect, the present disclosure provides an antibody or antigen-binding fragment thereof comprising a CDR-H3 comprising the amino acid sequence of SEQ ID NO: 1849, and a CDR-L3 comprising the amino acid sequence of SEQ ID NO: 2120.

[2615] In one aspect, the present disclosure provides an antibody or antigen-binding fragment thereof comprising at least one, at least two, or all three VH CDR sequences selected from: a. CDR-H1 comprising the amino acid sequence of SEQ ID NO: 765, b. CDR-H2 comprising the amino acid sequence of SEQ ID NO: 1307, c. CDR-H3 comprising the amino acid sequence of SEQ ID NO: 1849, and a VL comprising the amino acid sequence of SEQ ID NO: 494.

[2616] In one aspect, the present disclosure provides an antibody or antigen-binding fragment thereof comprising at least one, at least two, or all three VL CDR sequences selected from: a. CDR-L1 comprising the amino acid sequence of SEQ ID NO: 1036, b. CDR-L2 comprising the amino acid sequence of SEQ ID NO: 1578, c. CDR-L3 comprising the amino acid sequence of SEQ ID NO: 2120, and a VH comprising the amino acid sequence of SEQ ID NO: 223.

[2617] In one aspect, an antibody or antigen-binding fragment thereof is provided, wherein the antibody or antigen-binding fragment thereof comprises a heavy chain variable domain (VH) having at least 90%, 91%, 92%, 93%, 94%, 95%, 96%, 97%, 98%, 99%, or 100% sequence identity to the amino acid sequence SEQ ID NO: 223. In some embodiments, a VH sequence having at least 90%, 91%, 92%, 93%, 94%, 95%, 96%, 97%, 98%, or 99% identity contains substitutions (e.g., conservative substitutions), insertions, or deletions relative to the reference sequence, but an antibody or antigen-binding fragment thereof comprising that sequence retains the ability to bind to same antigen as of the parent (e.g., cancer associated antigen). In some embodiments, a total of 1 to 10 amino acids have been substituted, inserted and/or deleted in the amino acid sequence SEQ ID NO: 223. In some embodiments, substitutions, insertions, or deletions occur in regions outside the CDRs (e.g., in the FRs). Optionally, the antibody or antigen-binding fragment thereof comprises the VH sequence SEQ ID NO: 223, including one or more post-translational modifications of that sequence. In a particular embodiment, the VH comprises one, two or three CDRs selected from: a. CDR-H1, comprising the amino acid sequence SEQ ID NO: 765, b. CDR-H2, comprising the amino acid sequence SEQ ID NO: 1307, and c. CDR-H3, comprising the amino acid sequence SEQ ID NO: 1849.

[2618] In one aspect, an antibody or antigen-binding fragment thereof is provided, wherein the antibody or antigen-binding fragment thereof comprises a light chain variable domain (VL) having at least 90%, 91%, 92%, 93%, 94%, 95%, 96%, 97%, 98%, 99%, or 100% sequence identity to the amino acid sequence SEQ ID NO: 494. In some embodiments, a VL sequence having at least 90%, 91%, 92%, 93%, 94%, 95%, 96%, 97%, 98%, or 99% identity contains substitutions (e.g., conservative substitutions), insertions, or deletions relative to the reference sequence, but an antibody or antigen-binding fragment thereof comprising that sequence retains the ability to bind to same antigen as the parent (e.g., cancer associated antigen). In some embodiments, a total of 1 to 10 amino acids have been substituted, inserted and/or deleted in the amino acid sequence SEQ ID NO: 494. In some embodiments, the substitutions, insertions, or deletions occur in regions outside the CDRs (e.g., in the FRs). Optionally, the antibody or antigen-binding fragment thereof comprises the VL sequence SEQ ID NO: 494, including one or more post-translational modifications of that sequence. In a particular embodiment, the VL comprises one, two or three CDRs selected from: a. CDR-L1, comprising the amino acid sequence SEQ ID NO: 1036, b. CDR-L2, comprising the amino acid sequence SEQ ID NO: 1578, and c. CDR-L3, comprising the amino acid sequence SEQ ID NO: 2120.

[2619] In one aspect, an antibody or antigen-binding fragment thereof is provided, wherein the antibody or antigen-binding fragment thereof comprises a VH as in any of the embodiments provided above, and a VL as in any of the embodiments provided above. In some embodiments, the antibody or antigen-binding fragment thereof comprises the VH amino acid sequence of SEQ ID NO: 223, and the VL amino acid sequence of SEQ ID NO: 494, optionally including post-translational modifications of those sequences.

### TSAR1002

[2620] In one aspect, the present disclosure provides an antibody or antigen-binding fragment thereof comprising at least one or both variable regions selected from: a. VH comprising the amino acid sequence of SEQ ID NO: 224 and b. VL comprising the amino acid sequence of SEQ ID NO: 495.

[2621] In one aspect, the present disclosure provides an antibody or antigen-binding fragment thereof comprising at least one, two, three, four, five, or six CDRs selected from: a. CDR-H1 comprising the amino acid sequence of SEQ ID NO: 766, b. CDR-H2 comprising the amino acid sequence of SEQ ID NO: 1308, c. CDR-H3 comprising the amino acid sequence of SEQ ID NO: 1850, d. CDR-L1 comprising the amino acid sequence of SEQ ID NO: 1037, e. CDR-L2 comprising the amino acid sequence of SEQ ID NO: 1579, and f. CDR-L3 comprising the amino acid sequence of SEQ ID NO: 2121.

[2622] In one aspect, the present disclosure provides an antibody or antigen-binding fragment thereof comprising a CDR-H3 comprising the amino acid sequence of SEQ ID NO: 1850, and a CDR-L3 comprising the amino acid sequence of SEQ ID NO: 2121.

[2623] In one aspect, the present disclosure provides an antibody or antigen-binding fragment thereof comprising at least one, at least two, or all three VH CDR sequences selected from: a. CDR-H1 comprising the amino acid sequence of SEQ ID NO: 766, b. CDR-H2 comprising the amino acid sequence of SEQ ID NO: 1308, c. CDR-H3 comprising the amino acid sequence of SEQ ID NO: 1850, and a VL comprising the amino acid sequence of SEQ ID NO: 495.

[2624] In one aspect, the present disclosure provides an antibody or antigen-binding fragment thereof comprising at least one, at least two, or all three VL CDR sequences selected from: a. CDR-L1 comprising the amino acid sequence of SEQ ID NO: 1037, b. CDR-L2 comprising the amino acid sequence of SEQ ID NO: 1579, c. CDR-L3 comprising the amino acid sequence of SEQ ID NO: 2121, and a VH comprising the amino acid sequence of SEQ ID NO: 224.

[2625] In one aspect, an antibody or antigen-binding fragment thereof is provided, wherein the antibody or antigen-binding fragment thereof comprises a heavy chain variable domain (VH) having at least 90%, 91%, 92%, 93%, 94%, 95%, 96%, 97%, 98%, 99%, or 100% sequence identity to the amino acid sequence SEQ ID NO: 224. In some embodiments, a VH sequence having at least 90%, 91%, 92%, 93%, 94%, 95%, 96%, 97%, 98%, or 99% identity contains substitutions (e.g., conservative substitutions), insertions, or deletions relative to the reference sequence, but an antibody or antigen-binding fragment thereof comprising that sequence retains the ability to bind to same antigen as of the parent (e.g., cancer associated antigen). In some embodiments, a total of 1 to 10 amino acids have been substituted, inserted and/or deleted in the amino acid sequence SEQ ID NO: 224. In some embodiments, substitutions, insertions, or deletions occur in regions outside the CDRs (e.g., in the FRs). Optionally, the antibody or antigen-binding fragment thereof comprises the VH sequence SEQ ID NO: 224, including one or more post-translational modifications of that sequence. In a particular embodiment, the VH comprises one, two or three CDRs selected from: a. CDR-H1, comprising the amino acid sequence SEQ ID NO: 766, b. CDR-H2, comprising the amino acid sequence SEQ ID NO: 1308, and c. CDR-H3, comprising the amino acid sequence SEQ ID NO: 1850.

[2626] In one aspect, an antibody or antigen-binding fragment thereof is provided, wherein the antibody or antigen-binding fragment thereof comprises a light chain variable domain (VL) having at least 90%, 91%, 92%, 93%, 94%, 95%, 96%, 97%, 98%, 99%, or 100% sequence identity to the amino acid sequence SEQ ID NO: 495. In some embodiments, a VL sequence having at least 90%, 91%, 92%, 93%, 94%, 95%, 96%, 97%, 98%, or 99% identity contains substitutions (e.g., conservative substitutions), insertions, or deletions relative to the reference sequence, but an antibody or antigen-binding fragment thereof comprising that sequence retains the ability to bind to same antigen as the parent (e.g., cancer associated antigen). In some embodiments, a total of 1 to 10 amino acids have been substituted, inserted and/or deleted in the amino acid sequence SEQ ID NO: 495. In some embodiments, the substitutions, insertions, or deletions occur in regions outside the CDRs (e.g., in the FRs). Optionally, the antibody or antigen-binding fragment thereof comprises the VL sequence SEQ ID NO: 495, including one or more post-translational modifications of that sequence. In a particular embodiment, the VL comprises one, two or three CDRs selected from: a. CDR-L1, comprising the amino acid sequence SEQ ID NO: 1037, b. CDR-L2, comprising the amino acid sequence SEQ ID NO: 1579, and c. CDR-L3, comprising the amino acid sequence SEQ ID NO: 2121.

[2627] In one aspect, an antibody or antigen-binding fragment thereof is provided, wherein the antibody or antigen-binding fragment thereof comprises a VH as in any of the embodiments provided above, and a VL as in any of the embodiments provided above. In some embodiments, the antibody or antigen-binding fragment thereof comprises the VH amino acid sequence of SEQ ID NO: 224, and the VL amino acid sequence of SEQ ID NO: 495, optionally including post-translational modifications of those sequences.

### TSAR1003

[2628] In one aspect, the present disclosure provides an antibody or antigen-binding fragment thereof comprising at least one or both variable regions selected from: a. VH comprising the amino acid sequence of SEQ ID NO: 225 and b. VL comprising the amino acid sequence of SEQ ID NO: 496.

[2629] In one aspect, the present disclosure provides an antibody or antigen-binding fragment thereof comprising at least one, two, three, four, five, or six CDRs selected from: a. CDR-H1 comprising the amino acid sequence of SEQ ID NO: 767, b. CDR-H2 comprising the amino acid sequence of SEQ ID NO: 1309, c. CDR-H3 comprising the amino acid sequence of SEQ ID NO: 1851, d. CDR-L1 comprising the amino acid sequence of SEQ ID NO: 1038, e. CDR-L2 comprising the amino acid sequence of SEQ ID NO: 1580, and f. CDR-L3 comprising the amino acid sequence of SEQ ID NO: 2122.

[2630] In one aspect, the present disclosure provides an antibody or antigen-binding fragment thereof comprising a CDR-H3 comprising the amino acid sequence of SEQ ID NO: 1851, and a CDR-L3 comprising the amino acid sequence of SEQ ID NO: 2122.

[2631] In one aspect, the present disclosure provides an antibody or antigen-binding fragment thereof comprising at least one, at least two, or all three VH CDR sequences selected from: a. CDR-H1 comprising the amino acid sequence of SEQ ID NO: 767, b. CDR-H2 comprising the amino acid sequence of SEQ ID NO: 1309, c. CDR-H3 comprising the amino acid sequence of SEQ ID NO: 1851, and a VL comprising the amino acid sequence of SEQ ID NO: 496.

[2632] In one aspect, the present disclosure provides an antibody or antigen-binding fragment thereof comprising at least one, at least two, or all three VL CDR sequences selected from: a. CDR-L1 comprising the amino acid sequence of SEQ ID NO: 1038, b. CDR-L2 comprising the amino acid sequence of SEQ ID NO: 1580, c. CDR-L3 comprising the amino acid sequence of SEQ ID NO: 2122, and a VH comprising the amino acid sequence of SEQ ID NO: 225.

[2633] In one aspect, an antibody or antigen-binding fragment thereof is provided, wherein the antibody or antigen-binding fragment thereof comprises a heavy chain variable domain (VH) having at least 90%, 91%, 92%, 93%, 94%, 95%, 96%, 97%, 98%, 99%, or 100% sequence identity to the amino acid sequence SEQ ID NO: 225. In some embodiments, a VH sequence having at least 90%, 91%, 92%, 93%, 94%, 95%, 96%, 97%, 98%, or 99% identity contains substitutions (e.g., conservative substitutions), insertions, or deletions relative to the reference sequence, but an antibody or antigen-binding fragment thereof comprising that sequence retains the ability to bind to same antigen as of the parent (e.g., cancer associated antigen). In some embodiments, a total of 1 to 10 amino acids have been substituted, inserted and/or deleted in the amino acid sequence SEQ ID NO: 225. In some embodiments, substitutions, insertions, or deletions occur in regions outside the CDRs (e.g., in the FRs). Optionally, the antibody or antigen-binding fragment thereof comprises the VH sequence SEQ ID NO: 225, including one or more post-translational modifications of that sequence. In a particular embodiment, the VH comprises one, two or three CDRs selected from: a. CDR-H1, comprising the amino acid sequence SEQ ID NO: 767, b. CDR-H2, comprising the amino acid sequence SEQ ID NO: 1309, and c. CDR-H3, comprising the amino acid sequence SEQ ID NO: 1851.

[2634] In one aspect, an antibody or antigen-binding fragment thereof is provided, wherein the antibody or antigen-binding fragment thereof comprises a light chain variable domain (VL) having at least 90%, 91%, 92%, 93%, 94%, 95%, 96%, 97%, 98%, 99%, or 100% sequence identity to the amino acid sequence SEQ ID NO: 496. In some embodiments, a VL sequence having at least 90%, 91%, 92%, 93%, 94%, 95%, 96%, 97%, 98%, or 99% identity contains substitutions (e.g., conservative substitutions), insertions, or deletions relative to the reference sequence, but an antibody or antigen-binding fragment thereof comprising that sequence retains the ability to bind to same antigen as the parent (e.g., cancer associated antigen). In some embodiments, a total of 1 to 10 amino acids have been substituted, inserted and/or deleted in the amino acid sequence SEQ ID NO: 496. In some embodiments, the substitutions, insertions, or deletions occur in regions outside the CDRs (e.g., in the FRs). Optionally, the antibody or antigen-binding fragment thereof comprises the VL sequence SEQ ID NO: 496, including one or more post-translational modifications of that sequence. In a particular embodiment, the VL comprises one, two or three CDRs selected from: a. CDR-L1, comprising the amino acid sequence SEQ ID NO: 1038, b. CDR-L2, comprising the amino acid sequence SEQ ID NO: 1580, and c. CDR-L3, comprising the amino acid sequence SEQ ID NO: 2122.

[2635] In one aspect, an antibody or antigen-binding fragment thereof is provided, wherein the antibody or antigen-binding fragment thereof comprises a VH as in any of the embodiments provided above, and a VL as in any of the embodiments provided above. In some embodiments, the antibody or antigen-binding fragment thereof comprises the VH amino acid sequence of SEQ ID NO: 225, and the VL amino acid sequence of SEQ ID NO: 496, optionally including post-translational modifications of those sequences.

### TSAR1004

[2636] In one aspect, the present disclosure provides an antibody or antigen-binding fragment thereof comprising at least one or both variable regions selected from: a. VH comprising the amino acid sequence of SEQ ID NO: 226 and b. VL comprising the amino acid sequence of SEQ ID NO: 497.

[2637] In one aspect, the present disclosure provides an antibody or antigen-binding fragment thereof comprising at least one, two, three, four, five, or six CDRs selected from: a. CDR-H1 comprising the amino acid sequence of SEQ ID NO: 768, b. CDR-H2 comprising the amino acid sequence of SEQ ID NO: 1310, c. CDR-H3 comprising the amino acid sequence of SEQ ID NO: 1852, d. CDR-L1 comprising the amino acid sequence of SEQ ID NO: 1039, e. CDR-L2 comprising the amino acid sequence of SEQ ID NO: 1581, and f. CDR-L3 comprising the amino acid sequence of SEQ ID NO: 2123.

[2638] In one aspect, the present disclosure provides an antibody or antigen-binding fragment thereof comprising a CDR-H3 comprising the amino acid sequence of SEQ ID NO: 1852, and a CDR-L3 comprising the amino acid sequence of SEQ ID NO: 2123.

[2639] In one aspect, the present disclosure provides an antibody or antigen-binding fragment thereof comprising at least one, at least two, or all three VH CDR sequences selected from: a. CDR-H1 comprising the amino acid sequence of SEQ ID NO: 768, b. CDR-H2 comprising the amino acid sequence of SEQ ID NO: 1310, c. CDR-H3 comprising the amino acid sequence of SEQ ID NO: 1852, and a VL comprising the amino acid sequence of SEQ ID NO: 497.

[2640] In one aspect, the present disclosure provides an antibody or antigen-binding fragment thereof comprising at least one, at least two, or all three VL CDR sequences selected from: a. CDR-L1 comprising the amino acid sequence of SEQ ID NO: 1039, b. CDR-L2 comprising the amino acid sequence of SEQ ID NO: 1581, c. CDR-L3 comprising the amino acid sequence of SEQ ID NO: 2123, and a VH comprising the amino acid sequence of SEQ ID NO: 226.

[2641] In one aspect, an antibody or antigen-binding fragment thereof is provided, wherein the antibody or antigen-binding fragment thereof comprises a heavy chain variable domain (VH) having at least 90%, 91%, 92%, 93%, 94%, 95%, 96%, 97%, 98%, 99%, or 100% sequence identity to the amino acid sequence SEQ ID NO: 226. In some embodiments, a VH sequence having at least 90%, 91%, 92%, 93%, 94%, 95%, 96%, 97%, 98%, or 99% identity contains substitutions (e.g., conservative substitutions), insertions, or deletions relative to the reference sequence, but an antibody or antigen-binding fragment thereof comprising that sequence retains the ability to bind to same antigen as of the parent (e.g., cancer associated antigen). In some embodiments, a total of 1 to 10 amino acids have been substituted, inserted and/or deleted in the amino acid sequence SEQ ID NO: 226. In some embodiments, substitutions, antigen-binding fragment thereof comprises the VH sequence SEQ ID NO: 226, including one or more post-translational modifications of that sequence. In a particular embodiment, the VH comprises one, two or three CDRs selected from: a. CDR-H1, comprising the amino acid sequence SEQ ID NO: 768, b. CDR-H2, comprising the amino acid sequence SEQ ID NO: 1310, and c. CDR-H3, comprising the amino acid sequence SEQ ID NO: 1852.

[2642] In one aspect, an antibody or antigen-binding fragment thereof is provided, wherein the antibody or antigen-binding fragment thereof comprises a light chain variable domain (VL) having at least 90%, 91%, 92%, 93%, 94%, 95%, 96%, 97%, 98%, 99%, or 100% sequence identity to the amino acid sequence SEQ ID NO: 497. In some embodiments, a VL sequence having at least 90%, 91%, 92%, 93%, 94%, 95%, 96%, 97%, 98%, or 99% identity contains substitutions (e.g., conservative substitutions), insertions, or deletions relative to the reference sequence, but an antibody or antigen-binding fragment thereof comprising that sequence retains the ability to bind to same antigen as the parent (e.g., cancer associated antigen). In some embodiments, a total of 1 to 10 amino acids have been substituted, inserted and/or deleted in the amino acid sequence SEQ ID NO: 497. In some embodiments, the substitutions, insertions, or deletions occur in regions outside the CDRs (e.g., in the FRs). Optionally, the antibody or antigen-binding fragment thereof comprises the VL sequence SEQ ID NO: 497, including one or more post-translational modifications of that sequence. In a particular embodiment, the VL comprises one, two or three CDRs selected from: a. CDR-L1, comprising the amino acid sequence SEQ ID NO: 1039, b. CDR-L2, comprising the amino acid sequence SEQ ID NO: 1581, and c. CDR-L3, comprising the amino acid sequence SEQ ID NO: 2123.

[2643] In one aspect, an antibody or antigen-binding fragment thereof is provided, wherein the antibody or antigen-binding fragment thereof comprises a VH as in any of the embodiments provided above, and a VL as in any of the embodiments provided above. In some embodiments, the antibody or antigen-binding fragment thereof comprises the VH amino acid sequence of SEQ ID NO: 226, and the VL amino acid sequence of SEQ ID NO: 497, optionally including post-translational modifications of those sequences.

### TSAR1005

[2644] In one aspect, the present disclosure provides an antibody or antigen-binding fragment thereof comprising at least one or both variable regions selected from: a. VH comprising the amino acid sequence of SEQ ID NO: 227 and b. VL comprising the amino acid sequence of SEQ ID NO: 498.

[2645] In one aspect, the present disclosure provides an antibody or antigen-binding fragment thereof comprising at least one, two, three, four, five, or six CDRs selected from: a. CDR-H1 comprising the amino acid sequence of SEQ ID NO: 769, b. CDR-H2 comprising the amino acid sequence of SEQ ID NO: 1311, c. CDR-H3 comprising the amino acid sequence of SEQ ID NO: 1853, d. CDR-L1 comprising the amino acid sequence of SEQ ID NO: 1040, e. CDR-L2 comprising the amino acid sequence of SEQ ID NO: 1582, and f. CDR-L3 comprising the amino acid sequence of SEQ ID NO: 2124.

[2646] In one aspect, the present disclosure provides an antibody or antigen-binding fragment thereof comprising a CDR-H3 comprising the amino acid sequence of SEQ ID NO: 1853, and a CDR-L3 comprising the amino acid sequence of SEQ ID NO: 2124.

[2647] In one aspect, the present disclosure provides an antibody or antigen-binding fragment thereof comprising at least one, at least two, or all three VH CDR sequences selected from: a. CDR-H1 comprising the amino acid sequence of SEQ ID NO: 769, b. CDR-H2 comprising the amino acid sequence of SEQ ID NO: 1311, c. CDR-H3 comprising the amino acid sequence of SEQ ID NO: 1853, and a VL comprising the amino acid sequence of SEQ ID NO: 498.

[2648] In one aspect, the present disclosure provides an antibody or antigen-binding fragment thereof comprising at least one, at least two, or all three VL CDR sequences selected from: a. CDR-L1 comprising the amino acid sequence of SEQ ID NO: 1040, b. CDR-L2 comprising the amino acid sequence of SEQ ID NO: 1582, c. CDR-L3 comprising the amino acid sequence of SEQ ID NO: 2124, and a VH comprising the amino acid sequence of SEQ ID NO: 227.

[2649] In one aspect, an antibody or antigen-binding fragment thereof is provided, wherein the antibody or antigen-binding fragment thereof comprises a heavy chain variable domain (VH) having at least 90%, 91%, 92%, 93%, 94%, 95%, 96%, 97%, 98%, 99%, or 100% sequence identity to the amino acid sequence SEQ ID NO: 227. In some embodiments, a VH sequence having at least 90%, 91%, 92%, 93%, 94%, 95%, 96%, 97%, 98%, or 99% identity contains substitutions (e.g., conservative substitutions), insertions, or deletions relative to the reference sequence, but an antibody or antigen-binding fragment thereof comprising that sequence retains the ability to bind to same antigen as of the parent (e.g., cancer associated antigen). In some embodiments, a total of 1 to 10 amino acids have been substituted, inserted and/or deleted in the amino acid sequence SEQ ID NO: 227. In some embodiments, substitutions, insertions, or deletions occur in regions outside the CDRs (e.g., in the FRs). Optionally, the antibody or antigen-binding fragment thereof comprises the VH sequence SEQ ID NO: 227, including one or more post-translational modifications of that sequence. In a particular embodiment, the VH comprises one, two or three CDRs selected from: a. CDR-H1, comprising the amino acid sequence SEQ ID NO: 769, b. CDR-H2, comprising the amino acid sequence SEQ ID NO: 1311, and c. CDR-H3, comprising the amino acid sequence SEQ ID NO: 1853.

[2650] In one aspect, an antibody or antigen-binding fragment thereof is provided, wherein the antibody or antigen-binding fragment thereof comprises a light chain variable domain (VL) having at least 90%, 91%, 92%, 93%, 94%, 95%, 96%, 97%, 98%, 99%, or 100% sequence identity to the amino acid sequence SEQ ID NO: 498. In some embodiments, a VL sequence having at least 90%, 91%, 92%, 93%, 94%, 95%, 96%, 97%, 98%, or 99% identity contains substitutions (e.g., conservative substitutions), insertions, or deletions relative to the reference sequence, but an antibody or antigen-binding fragment thereof comprising that sequence retains the ability to bind to same antigen as the parent (e.g., cancer associated antigen). In some embodiments, a total of 1 to 10 amino acids have been substituted, inserted and/or deleted in the amino acid sequence SEQ ID NO: 498. In some embodiments, the substitutions, insertions, or deletions occur in regions outside the CDRs (e.g., in the FRs). Optionally, the antibody or antigen-binding fragment thereof comprises the VL sequence SEQ ID NO: 498, including one or more post-translational modifications of that sequence. In a particular embodiment, the VL comprises one, two or three CDRs selected from: a. CDR-L1, comprising the amino acid sequence SEQ ID NO: 1040, b. CDR-L2, comprising the amino acid sequence SEQ ID NO: 1582, and c. CDR-L3, comprising the amino acid sequence SEQ ID NO: 2124.

[2651] In one aspect, an antibody or antigen-binding fragment thereof is provided, wherein the antibody or antigen-binding fragment thereof comprises a VH as in any of the embodiments provided above, and a VL as in any of the embodiments provided above. In some embodiments, the antibody or antigen-binding fragment thereof comprises the VH amino acid sequence of SEQ ID NO: 227, and the VL amino acid sequence of SEQ ID NO: 498, optionally including post-translational modifications of those sequences.

### TSAR1006

[2652] In one aspect, the present disclosure provides an antibody or antigen-binding fragment thereof comprising at least one or both variable regions selected from: a. VH comprising the amino acid sequence of SEQ ID NO: 228 and b. VL comprising the amino acid sequence of SEQ ID NO: 499.

[2653] In one aspect, the present disclosure provides an antibody or antigen-binding fragment thereof comprising at least one, two, three, four, five, or six CDRs selected from: a. CDR-H1 comprising the amino acid sequence of SEQ ID NO: 770, b. CDR-H2 comprising the amino acid sequence of SEQ ID NO: 1312, c. CDR-H3 comprising the amino acid sequence of SEQ ID NO: 1854, d. CDR-L1 comprising the amino acid sequence of SEQ ID NO: 1041, e. CDR-L2 comprising the amino acid sequence of SEQ ID NO: 1583, and f. CDR-L3 comprising the amino acid sequence of SEQ ID NO: 2125.

[2654] In one aspect, the present disclosure provides an antibody or antigen-binding fragment thereof comprising CDR-H3 comprising the amino acid sequence of SEQ ID NO: 1854, and a CDR-L3 comprising the amino acid sequence of SEQ ID NO: 2125.

[2655] In one aspect, the present disclosure provides an antibody or antigen-binding fragment thereof comprising at least one, at least two, or all three VH CDR sequences selected from: a. CDR-H1 comprising the amino acid sequence of SEQ ID NO: 770, b. CDR-H2 comprising the amino acid sequence of SEQ ID NO: 1312, c. CDR-H3 comprising the amino acid sequence of SEQ ID NO: 1854, and a VL comprising the amino acid sequence of SEQ ID NO: 499.

[2656] In one aspect, the present disclosure provides an antibody or antigen-binding fragment thereof comprising at least one, at least two, or all three VL CDR sequences selected from: a. CDR-L1 comprising the amino acid sequence of SEQ ID NO: 1041, b. CDR-L2 comprising the amino acid sequence of SEQ ID NO: 1583, c. CDR-L3 comprising the amino acid sequence of SEQ ID NO: 2125, and a VH comprising the amino acid sequence of SEQ ID NO: 228.

[2657] In one aspect, an antibody or antigen-binding fragment thereof is provided, wherein the antibody or antigen-binding fragment thereof comprises a heavy chain variable domain (VH) having at least 90%, 91%, 92%, 93%, 94%, 95%, 96%, 97%, 98%, 99%, or 100% sequence identity to the amino acid sequence SEQ ID NO: 228. In some embodiments, a VH sequence having at least 90%, 91%, 92%, 93%, 94%, 95%, 96%, 97%, 98%, or 99% identity contains substitutions (e.g., conservative substitutions), insertions, or deletions relative to the reference sequence, but an antibody or antigen-binding fragment thereof comprising that sequence retains the ability to bind to same antigen as of the parent (e.g., cancer associated antigen). In some embodiments, a total of 1 to 10 amino acids have been substituted, inserted and/or deleted in the amino acid sequence SEQ ID NO: 228. In some embodiments, substitutions, insertions, or deletions occur in regions outside the CDRs (e.g., in the FRs). Optionally, the antibody or antigen-binding fragment thereof comprises the VH sequence SEQ ID NO: 228, including one or more post-translational modifications of that sequence. In a particular embodiment, the VH comprises one, two or three CDRs selected from: a. CDR-H1, comprising the amino acid sequence SEQ ID NO: 770, b. CDR-H2, comprising the amino acid sequence SEQ ID NO: 1312, and c. CDR-H3, comprising the amino acid sequence SEQ ID NO: 1854.

[2658] In one aspect, an antibody or antigen-binding fragment thereof is provided, wherein the antibody or antigen-binding fragment thereof comprises a light chain variable domain (VL) having at least 90%, 91%, 92%, 93%, 94%, 95%, 96%, 97%, 98%, 99%, or 100% sequence identity to the amino acid sequence SEQ ID NO: 499. In some embodiments, a VL sequence having at least 90%, 91%, 92%, 93%, 94%, 95%, 96%, 97%, 98%, or 99% identity contains substitutions (e.g., conservative substitutions), insertions, or deletions relative to the reference sequence, but an antibody or antigen-binding fragment thereof comprising that sequence retains the ability to bind to same antigen as the parent (e.g., cancer associated antigen). In some embodiments, a total of 1 to 10 amino acids have been substituted, inserted and/or deleted in the amino acid sequence SEQ ID NO: 499. In some embodiments, the substitutions, insertions, or deletions occur in regions outside the CDRs (e.g., in the FRs). Optionally, the antibody or antigen-binding fragment thereof comprises the VL sequence SEQ ID NO: 499, including one or more post-translational modifications of that sequence. In a particular embodiment, the VL comprises one, two or three CDRs selected from: a. CDR-L1, comprising the amino acid sequence SEQ ID NO: 1041, b. CDR-L2, comprising the amino acid sequence SEQ ID NO: 1583, and c. CDR-L3, comprising the amino acid sequence SEQ ID NO: 2125.

[2659] In one aspect, an antibody or antigen-binding fragment thereof is provided, wherein the antibody or antigen-binding fragment thereof comprises a VH as in any of the embodiments provided above, and a VL as in any of the embodiments provided above. In some embodiments, the antibody or antigen-binding fragment thereof comprises the VH amino acid sequence of SEQ ID NO: 228, and the VL amino acid sequence of SEQ ID NO: 499, optionally including post-translational modifications of those sequences.

### TSAR1007

[2660] In one aspect, the present disclosure provides an antibody or antigen-binding fragment thereof comprising at least one or both variable regions selected from: a. VH comprising the amino acid sequence of SEQ ID NO: 229 and b. VL comprising the amino acid sequence of SEQ ID NO: 500.

[2661] In one aspect, the present disclosure provides an antibody or antigen-binding fragment thereof comprising at least one, two, three, four, five, or six CDRs selected from: a. CDR-H1 comprising the amino acid sequence of SEQ ID NO: 771, b. CDR-H2 comprising the amino acid sequence of SEQ ID NO: 1313, c. CDR-H3 comprising the amino acid sequence of SEQ ID NO: 1855, d. CDR-L1 comprising the amino acid sequence of SEQ ID NO: 1042, e. CDR-L2 comprising the amino acid sequence of SEQ ID NO: 1584, and f. CDR-L3 comprising the amino acid sequence of SEQ ID NO: 2126.

[2662] In one aspect, the present disclosure provides an antibody or antigen-binding fragment thereof comprising a CDR-H3 comprising the amino acid sequence of SEQ ID NO: 1855, and a CDR-L3 comprising the amino acid sequence of SEQ ID NO: 2126.

[2663] In one aspect, the present disclosure provides an antibody or antigen-binding fragment thereof comprising at least one, at least two, or all three VH CDR sequences selected from: a. CDR-H1 comprising the amino acid sequence of SEQ ID NO: 771, b. CDR-H2 comprising the amino acid sequence of SEQ ID NO: 1313, c. CDR-H3 comprising the amino acid sequence of SEQ ID NO: 1855, and a VL comprising the amino acid sequence of SEQ ID NO: 500.

[2664] In one aspect, the present disclosure provides an antibody or antigen-binding fragment thereof comprising at least one, at least two, or all three VL CDR sequences selected from: a. CDR-L1 comprising the amino acid sequence of SEQ ID NO: 1042, b. CDR-L2 comprising the amino acid sequence of SEQ ID NO: 1584, c. CDR-L3 comprising the amino acid sequence of SEQ ID NO: 2126, and a VH comprising the amino acid sequence of SEQ ID NO: 229.

[2665] In one aspect, an antibody or antigen-binding fragment thereof is provided, wherein the antibody or antigen-binding fragment thereof comprises a heavy chain variable domain (VH) having at least 90%, 91%, 92%, 93%, 94%, 95%, 96%, 97%, 98%, 99%, or 100% sequence identity to the amino acid sequence SEQ ID NO: 229. In some embodiments, a VH sequence having at least 90%, 91%, 92%, 93%, 94%, 95%, 96%, 97%, 98%, or 99% identity contains substitutions (e.g., conservative substitutions), insertions, or deletions relative to the reference sequence, but an antibody or antigen-binding fragment thereof comprising that sequence retains the ability to bind to same antigen as of the parent (e.g., cancer associated antigen). In some embodiments, a total of 1 to 10 amino acids have been substituted, inserted and/or deleted in the amino acid sequence SEQ ID NO: 229. In some embodiments, substitutions, insertions, or deletions occur in regions outside the CDRs (e.g., in the FRs). Optionally, the antibody or antigen-binding fragment thereof comprises the VH sequence SEQ ID NO: 229, including one or more post-translational modifications of that sequence. In a particular embodiment, the VH comprises one, two or three CDRs selected from: a. CDR-H1, comprising the amino acid sequence SEQ ID NO: 771, b. CDR-H2, comprising the amino acid sequence SEQ ID NO: 1313, and c. CDR-H3, comprising the amino acid sequence SEQ ID NO: 1855.

[2666] In one aspect, an antibody or antigen-binding fragment thereof is provided, wherein the antibody or antigen-binding fragment thereof comprises a light chain variable domain (VL) having at least 90%, 91%, 92%, 93%, 94%, 95%, 96%, 97%, 98%, 99%, or 100% sequence identity to the amino acid sequence SEQ ID NO: 500. In some embodiments, a VL sequence having at least 90%, 91%, 92%, 93%, 94%, 95%, 96%, 97%, 98%, or 99% identity contains substitutions (e.g., conservative substitutions), insertions, or deletions relative to the reference sequence, but an antibody or antigen-binding fragment thereof comprising that sequence retains the ability to bind to same antigen as the parent (e.g., cancer associated antigen). In some embodiments, a total of 1 to 10 amino acids have been substituted, inserted and/or deleted in the amino acid sequence SEQ ID NO: 500. In some embodiments, the substitutions, antigen-binding fragment thereof comprises the VL sequence SEQ ID NO: 500, including one or more post-translational modifications of that sequence. In a particular embodiment, the VL comprises one, two or three CDRs selected from: a. CDR-L1, comprising the amino acid sequence SEQ ID NO: 1042, b CDR-L2, comprising the amino acid sequence SEQ ID NO: 1584, and c. CDR-L3, comprising the amino acid sequence SEQ ID NO: 2126.

[2667] In one aspect, an antibody or antigen-binding fragment thereof is provided, wherein the antibody or antigen-binding fragment thereof comprises a VH as in any of the embodiments provided above, and a VL as in any of the embodiments provided above. In some embodiments, the antibody or antigen-binding fragment thereof comprises the VH amino acid sequence of SEQ ID NO: 229, and the VL amino acid sequence of SEQ ID NO: 500, optionally including post-translational modifications of those sequences.

### TSAR1008

[2668] In one aspect, the present disclosure provides an antibody or antigen-binding fragment thereof comprising at least one or both variable regions selected from: a. VH comprising the amino acid sequence of SEQ ID NO: 230 and b. VL comprising the amino acid sequence of SEQ ID NO: 501.

[2669] In one aspect, the present disclosure provides an antibody or antigen-binding fragment thereof comprising at least one, two, three, four, five, or six CDRs selected from: a. CDR-H1 comprising the amino acid sequence of SEQ ID NO: 772, b. CDR-H2 comprising the amino acid sequence of SEQ ID NO: 1314, c. CDR-H3 comprising the amino acid sequence of SEQ ID NO: 1856, d. CDR-L1 comprising the amino acid sequence of SEQ ID NO: 1043, e. CDR-L2 comprising the amino acid sequence of SEQ ID NO: 1585, and f. CDR-L3 comprising the amino acid sequence of SEQ ID NO: 2127.

[2670] In one aspect, the present disclosure provides an antibody or antigen-binding fragment thereof comprising a CDR-H3 comprising the amino acid sequence of SEQ ID NO: 1856, and a CDR-L3 comprising the amino acid sequence of SEQ ID NO: 2127.

[2671] In one aspect, the present disclosure provides an antibody or antigen-binding fragment thereof comprising at least one, at least two, or all three VH CDR sequences selected from: a. CDR-H1 comprising the amino acid sequence of SEQ ID NO: 772, b. CDR-H2 comprising the amino acid sequence of SEQ ID NO: 1314, c. CDR-H3 comprising the amino acid sequence of SEQ ID NO: 1856, and a VL comprising the amino acid sequence of SEQ ID NO: 501.

[2672] In one aspect, the present disclosure provides an antibody or antigen-binding fragment thereof comprising at least one, at least two, or all three VL CDR sequences selected from: a. CDR-L1 comprising the amino acid sequence of SEQ ID NO: 1043, b. CDR-L2 comprising the amino acid sequence of SEQ ID NO: 1585, c. CDR-L3 comprising the amino acid sequence of SEQ ID NO: 2127, and a VH comprising the amino acid sequence of SEQ ID NO: 230.

[2673] In one aspect, an antibody or antigen-binding fragment thereof is provided, wherein the antibody or antigen-binding fragment thereof comprises a heavy chain variable domain (VH) having at least 90%, 91%, 92%, 93%, 94%, 95%, 96%, 97%, 98%, 99%, or 100% sequence identity to the amino acid sequence SEQ ID NO: 230. In some embodiments, a VH sequence having at least 90%, 91%, 92%, 93%, 94%, 95%, 96%, 97%, 98%, or 99% identity contains substitutions (e.g., conservative substitutions), thereof comprising that sequence retains the ability to bind to same antigen as of the parent (e.g., cancer associated antigen). In some embodiments, a total of 1 to 10 amino acids have been substituted, inserted and/or deleted in the amino acid sequence SEQ ID NO: 230. In some embodiments, substitutions, insertions, or deletions occur in regions outside the CDRs (e.g., in the FRs). Optionally, the antibody or antigen-binding fragment thereof comprises the VH sequence SEQ ID NO: 230, including one or more post-translational modifications of that sequence. In a particular embodiment, the VH comprises one, two or three CDRs selected from: a. CDR-H1, comprising the amino acid sequence SEQ ID NO: 772, b. CDR-H2, comprising the amino acid sequence SEQ ID NO: 1314, and c. CDR-H3, comprising the amino acid sequence SEQ ID NO: 1856.

[2674] In one aspect, an antibody or antigen-binding fragment thereof is provided, wherein the antibody or antigen-binding fragment thereof comprises a light chain variable domain (VL) having at least 90%, 91%, 92%, 93%, 94%, 95%, 96%, 97%, 98%, 99%, or 100% sequence identity to the amino acid sequence SEQ ID NO: 501. In some embodiments, a VL sequence having at least 90%, 91%, 92%, 93%, 94%, 95%, 96%, 97%, 98%, or 99% identity contains substitutions (e.g., conservative substitutions), insertions, or deletions relative to the reference sequence, but an antibody or antigen-binding fragment thereof comprising that sequence retains the ability to bind to same antigen as the parent (e.g., cancer associated antigen). In some embodiments, a total of 1 to 10 amino acids have been substituted, inserted and/or deleted in the amino acid sequence SEQ ID NO: 501. In some embodiments, the substitutions, insertions, or deletions occur in regions outside the CDRs (e.g., in the FRs). Optionally, the antibody or antigen-binding fragment thereof comprises the VL sequence SEQ ID NO: 501, including one or more post-translational modifications of that sequence. In a particular embodiment, the VL comprises one, two or three CDRs selected from: a. CDR-L1, comprising the amino acid sequence SEQ ID NO: 1043, b. CDR-L2, comprising the amino acid sequence SEQ ID NO: 1585, and c. CDR-L3, comprising the amino acid sequence SEQ ID NO: 2127.

[2675] In one aspect, an antibody or antigen-binding fragment thereof is provided, wherein the antibody or antigen-binding fragment thereof comprises a VH as in any of the embodiments provided above, and a VL as in any of the embodiments provided above. In some embodiments, the antibody or antigen-binding fragment thereof comprises the VH amino acid sequence of SEQ ID NO: 230, and the VL amino acid sequence of SEQ ID NO: 501, optionally including post-translational modifications of those sequences.

### TSTO1001

[2676] In one aspect, the present disclosure provides an antibody or antigen-binding fragment thereof comprising at least one or both variable regions selected from: a. VH comprising the amino acid sequence of SEQ ID NO: 231 and b. VL comprising the amino acid sequence of SEQ ID NO: 502.

[2677] In one aspect, the present disclosure provides an antibody or antigen-binding fragment thereof comprising at least one, two, three, four, five, or six CDRs selected from: a. CDR-H1 comprising the amino acid sequence of SEQ ID NO: 773, b. CDR-H2 comprising the amino acid sequence of SEQ ID NO: 1315, c. CDR-H3 comprising the amino acid sequence of SEQ ID NO: 1857, d. CDR-L1 comprising the amino acid sequence of SEQ ID NO: 1044, e. CDR-L2 comprising the amino acid sequence of SEQ ID NO: 1586, and f. CDR-L3 comprising the amino acid sequence of SEQ ID NO: 2128.

[2678] In one aspect, the present disclosure provides an antibody or antigen-binding fragment thereof comprising a CDR-H3 comprising the amino acid sequence of SEQ ID NO: 1857, and a CDR-L3 comprising the amino acid sequence of SEQ ID NO: 2128.

[2679] In one aspect, the present disclosure provides an antibody or antigen-binding fragment thereof comprising at least one, at least two, or all three VH CDR sequences selected from: a. CDR-H1 comprising the amino acid sequence of SEQ ID NO: 773, b. CDR-H2 comprising the amino acid sequence of SEQ ID NO: 1315, c. CDR-H3 comprising the amino acid sequence of SEQ ID NO: 1857, and a VL comprising the amino acid sequence of SEQ ID NO: 502.

[2680] In one aspect, the present disclosure provides an antibody or antigen-binding fragment thereof comprising at least one, at least two, or all three VL CDR sequences selected from: a. CDR-L1 comprising the amino acid sequence of SEQ ID NO: 1044, b. CDR-L2 comprising the amino acid sequence of SEQ ID NO: 1586, c. CDR-L3 comprising the amino acid sequence of SEQ ID NO: 2128, and a VH comprising the amino acid sequence of SEQ ID NO: 231.

[2681] In one aspect, an antibody or antigen-binding fragment thereof is provided, wherein the antibody or antigen-binding fragment thereof comprises a heavy chain variable domain (VH) having at least 90%, 91%, 92%, 93%, 94%, 95%, 96%, 97%, 98%, 99%, or 100% sequence identity to the amino acid sequence SEQ ID NO: 231. In some embodiments, a VH sequence having at least 90%, 91%, 92%, 93%, 94%, 95%, 96%, 97%, 98%, or 99% identity contains substitutions (e.g., conservative substitutions), insertions, or deletions relative to the reference sequence, but an antibody or antigen-binding fragment thereof comprising that sequence retains the ability to bind to same antigen as of the parent (e.g., cancer associated antigen). In some embodiments, a total of 1 to 10 amino acids have been substituted, inserted and/or deleted in the amino acid sequence SEQ ID NO: 231. In some embodiments, substitutions, insertions, or deletions occur in regions outside the CDRs (e.g., in the FRs). Optionally, the antibody or antigen-binding fragment thereof comprises the VH sequence SEQ ID NO: 231, including one or more post-translational modifications of that sequence. In a particular embodiment, the VH comprises one, two or three CDRs selected from: a. CDR-H1, comprising the amino acid sequence SEQ ID NO: 773, b. CDR-H2, comprising the amino acid sequence SEQ ID NO: 1315, and c. CDR-H3, comprising the amino acid sequence SEQ ID NO: 1857.

[2682] In one aspect, an antibody or antigen-binding fragment thereof is provided, wherein the antibody or antigen-binding fragment thereof comprises a light chain variable domain (VL) having at least 90%, 91%, 92%, 93%, 94%, 95%, 96%, 97%, 98%, 99%, or 100% sequence identity to the amino acid sequence SEQ ID NO: 502. In some embodiments, a VL sequence having at least 90%, 91%, 92%, 93%, 94%, 95%, 96%, 97%, 98%, or 99% identity contains substitutions (e.g., conservative substitutions), insertions, or deletions relative to the reference sequence, but an antibody or antigen-binding fragment thereof comprising that sequence retains the ability to bind to same antigen as the parent (e.g., cancer associated antigen). In some embodiments, a total of 1 to 10 amino acids have been substituted, inserted and/or deleted in the amino acid sequence SEQ ID NO: 502. In some embodiments, the substitutions, insertions, or deletions occur in regions outside the CDRs (e.g., in the FRs). Optionally, the antibody or antigen-binding fragment thereof comprises the VL sequence SEQ ID NO: 502, including one or more post-translational modifications of that sequence. In a particular embodiment, the VL comprises one, two or three CDRs selected from: a. CDR-L1, comprising the amino acid sequence SEQ ID NO: 1044, b. CDR-L2, comprising the amino acid sequence SEQ ID NO: 1586, and c. CDR-L3, comprising the amino acid sequence SEQ ID NO: 2128.

[2683] In one aspect, an antibody or antigen-binding fragment thereof is provided, wherein the antibody or antigen-binding fragment thereof comprises a VH as in any of the embodiments provided above, and a VL as in any of the embodiments provided above. In some embodiments, the antibody or antigen-binding fragment thereof comprises the VH amino acid sequence of SEQ ID NO: 231, and the VL amino acid sequence of SEQ ID NO: 502, optionally including post-translational modifications of those sequences.

### TSTO1002

[2684] In one aspect, the present disclosure provides an antibody or antigen-binding fragment thereof comprising at least one or both variable regions selected from: a. VH comprising the amino acid sequence of SEQ ID NO: 232 and b. VL comprising the amino acid sequence of SEQ ID NO: 503.

[2685] In one aspect, the present disclosure provides an antibody or antigen-binding fragment thereof comprising at least one, two, three, four, five, or six CDRs selected from: a. CDR-H1 comprising the amino acid sequence of SEQ ID NO: 774, b. CDR-H2 comprising the amino acid sequence of SEQ ID NO: 1316, c. CDR-H3 comprising the amino acid sequence of SEQ ID NO: 1858, d. CDR-L1 comprising the amino acid sequence of SEQ ID NO: 1045, e. CDR-L2 comprising the amino acid sequence of SEQ ID NO: 1587, and f. CDR-L3 comprising the amino acid sequence of SEQ ID NO: 2129.

[2686] In one aspect, the present disclosure provides an antibody or antigen-binding fragment thereof comprising a CDR-H3 comprising the amino acid sequence of SEQ ID NO: 1858, and a CDR-L3 comprising the amino acid sequence of SEQ ID NO: 2129.

[2687] In one aspect, the present disclosure provides an antibody or antigen-binding fragment thereof comprising at least one, at least two, or all three VH CDR sequences selected from: a. CDR-H1 comprising the amino acid sequence of SEQ ID NO: 774, b. CDR-H2 comprising the amino acid sequence of SEQ ID NO: 1316, c. CDR-H3 comprising the amino acid sequence of SEQ ID NO: 1858, and a VL comprising the amino acid sequence of SEQ ID NO: 503.

[2688] In one aspect, the present disclosure provides an antibody or antigen-binding fragment thereof comprising at least one, at least two, or all three VL CDR sequences selected from: a. CDR-L1 comprising the amino acid sequence of SEQ ID NO: 1045, b. CDR-L2 comprising the amino acid sequence of SEQ ID NO: 1587, c. CDR-L3 comprising the amino acid sequence of SEQ ID NO: 2129, and a VH comprising the amino acid sequence of SEQ ID NO: 232.

[2689] In one aspect, an antibody or antigen-binding fragment thereof is provided, wherein the antibody or antigen-binding fragment thereof comprises a heavy chain variable domain (VH) having at least 90%, 91%, 92%, 93%, 94%, 95%, 96%, 97%, 98%, 99%, or 100% sequence identity to the amino acid sequence SEQ ID NO: 232. In some embodiments, a VH sequence having at least 90%, 91%, 92%, 93%, 94%, 95%, 96%, 97%, 98%, or 99% identity contains substitutions (e.g., conservative substitutions), insertions, or deletions relative to the reference sequence, but an antibody or antigen-binding fragment thereof comprising that sequence retains the ability to bind to same antigen as of the parent (e.g., cancer associated antigen). In some embodiments, a total of 1 to 10 amino acids have been substituted, inserted and/or deleted in the amino acid sequence SEQ ID NO: 232. In some embodiments, substitutions, insertions, or deletions occur in regions outside the CDRs (e.g., in the FRs). Optionally, the antibody or antigen-binding fragment thereof comprises the VH sequence SEQ ID NO: 232, including one or more post-translational modifications of that sequence. In a particular embodiment, the VH comprises one, two or three CDRs selected from: a. CDR-H1, comprising the amino acid sequence SEQ ID NO: 774, b. CDR-H2, comprising the amino acid sequence SEQ ID NO: 1316, and c. CDR-H3, comprising the amino acid sequence SEQ ID NO: 1858.

[2690] In one aspect, an antibody or antigen-binding fragment thereof is provided, wherein the antibody or antigen-binding fragment thereof comprises a light chain variable domain (VL) having at least 90%, 91%, 92%, 93%, 94%, 95%, 96%, 97%, 98%, 99%, or 100% sequence identity to the amino acid sequence SEQ ID NO: 503. In some embodiments, a VL sequence having at least 90%, 91%, 92%, 93%, 94%, 95%, 96%, 97%, 98%, or 99% identity contains substitutions (e.g., conservative substitutions), insertions, or deletions relative to the reference sequence, but an antibody or antigen-binding fragment thereof comprising that sequence retains the ability to bind to same antigen as the parent (e.g., cancer associated antigen). In some embodiments, a total of 1 to 10 amino acids have been substituted, inserted and/or deleted in the amino acid sequence SEQ ID NO: 503. In some embodiments, the substitutions, insertions, or deletions occur in regions outside the CDRs (e.g., in the FRs). Optionally, the antibody or antigen-binding fragment thereof comprises the VL sequence SEQ ID NO: 503, including one or more post-translational modifications of that sequence. In a particular embodiment, the VL comprises one, two or three CDRs selected from: a. CDR-L1, comprising the amino acid sequence SEQ ID NO: 1045, b. CDR-L2, comprising the amino acid sequence SEQ ID NO: 1587, and c. CDR-L3, comprising the amino acid sequence SEQ ID NO: 2129.

[2691] In one aspect, an antibody or antigen-binding fragment thereof is provided, wherein the antibody or antigen-binding fragment thereof comprises a VH as in any of the embodiments provided above, and a VL as in any of the embodiments provided above. In some embodiments, the antibody or antigen-binding fragment thereof comprises the VH amino acid sequence of SEQ ID NO: 232, and the VL amino acid sequence of SEQ ID NO: 503, optionally including post-translational modifications of those sequences.

### TSTO1003

[2692] In one aspect, the present disclosure provides an antibody or antigen-binding fragment thereof comprising at least one or both variable regions selected from: a. VH comprising the amino acid sequence of SEQ ID NO: 233 and b. VL comprising the amino acid sequence of SEQ ID NO: 504.

[2693] In one aspect, the present disclosure provides an antibody or antigen-binding fragment thereof comprising at least one, two, three, four, five, or six CDRs selected from: a. CDR-H1 comprising the amino acid sequence of SEQ ID NO: 775, b. CDR-H2 comprising the amino acid sequence of SEQ ID NO: 1317, c. CDR-H3 comprising the amino acid sequence of SEQ ID NO: 1859, d. CDR-L1 comprising the amino acid sequence of SEQ ID NO: 1046, e. CDR-L2 comprising the amino acid sequence of SEQ ID NO: 1588, and f. CDR-L3 comprising the amino acid sequence of SEQ ID NO: 2130.

[2694] In one aspect, the present disclosure provides an antibody or antigen-binding fragment thereof comprising a CDR-H3 comprising the amino acid sequence of SEQ ID NO: 1859, and a CDR-L3 comprising the amino acid sequence of SEQ ID NO: 2130.

[2695] In one aspect, the present disclosure provides an antibody or antigen-binding fragment thereof comprising at least one, at least two, or all three VH CDR sequences selected from: a. CDR-H1 comprising the amino acid sequence of SEQ ID NO: 775, b. CDR-H2 comprising the amino acid sequence of SEQ ID NO: 1317, c. CDR-H3 comprising the amino acid sequence of SEQ ID NO: 1859, and d VL comprising the amino acid sequence of SEQ ID NO: 504.

[2696] In one aspect, the present disclosure provides an antibody or antigen-binding fragment thereof comprising at least one, at least two, or all three VL CDR sequences selected from: a. CDR-L1 comprising the amino acid sequence of SEQ ID NO: 1046, b. CDR-L2 comprising the amino acid sequence of SEQ ID NO: 1588, c. CDR-L3 comprising the amino acid sequence of SEQ ID NO: 2130, and a VH comprising the amino acid sequence of SEQ ID NO: 233.

[2697] In one aspect, an antibody or antigen-binding fragment thereof is provided, wherein the antibody or antigen-binding fragment thereof comprises a heavy chain variable domain (VH) having at least 90%, 91%, 92%, 93%, 94%, 95%, 96%, 97%, 98%, 99%, or 100% sequence identity to the amino acid sequence SEQ ID NO: 233. In some embodiments, a VH sequence having at least 90%, 91%, 92%, 93%, 94%, 95%, 96%, 97%, 98%, or 99% identity contains substitutions (e.g., conservative substitutions), insertions, or deletions relative to the reference sequence, but an antibody or antigen-binding fragment thereof comprising that sequence retains the ability to bind to same antigen as of the parent (e.g., cancer associated antigen). In some embodiments, a total of 1 to 10 amino acids have been substituted, inserted and/or deleted in the amino acid sequence SEQ ID NO: 233. In some embodiments, substitutions, insertions, or deletions occur in regions outside the CDRs (e.g., in the FRs). Optionally, the antibody or antigen-binding fragment thereof comprises the VH sequence SEQ ID NO: 233, including one or more post-translational modifications of that sequence. In a particular embodiment, the VH comprises one, two or three CDRs selected from: a. CDR-H1, comprising the amino acid sequence SEQ ID NO: 775, b. CDR-H2, comprising the amino acid sequence SEQ ID NO: 1317, and c. CDR-H3, comprising the amino acid sequence SEQ ID NO: 1859.

[2698] In one aspect, an antibody or antigen-binding fragment thereof is provided, wherein the antibody or antigen-binding fragment thereof comprises a light chain variable domain (VL) having at least 90%, 91%, 92%, 93%, 94%, 95%, 96%, 97%, 98%, 99%, or 100% sequence identity to the amino acid sequence SEQ ID NO: 504. In some embodiments, a VL sequence having at least 90%, 91%, 92%, 93%, 94%, 95%, 96%, 97%, 98%, or 99% identity contains substitutions (e.g., conservative substitutions), thereof comprising that sequence retains the ability to bind to same antigen as the parent (e.g., cancer associated antigen). In some embodiments, a total of 1 to 10 amino acids have been substituted, inserted and/or deleted in the amino acid sequence SEQ ID NO: 504. In some embodiments, the substitutions, insertions, or deletions occur in regions outside the CDRs (e.g., in the FRs). Optionally, the antibody or antigen-binding fragment thereof comprises the VL sequence SEQ ID NO: 504, including one or more post-translational modifications of that sequence. In a particular embodiment, the VL comprises one, two or three CDRs selected from: a. CDR-L1, comprising the amino acid sequence SEQ ID NO: 1046, b. CDR-L2, comprising the amino acid sequence SEQ ID NO: 1588, and c. CDR-L3, comprising the amino acid sequence SEQ ID NO: 2130.

[2699] In one aspect, an antibody or antigen-binding fragment thereof is provided, wherein the antibody or antigen-binding fragment thereof comprises a VH as in any of the embodiments provided above, and a VL as in any of the embodiments provided above. In some embodiments, the antibody or antigen-binding fragment thereof comprises the VH amino acid sequence of SEQ ID NO: 233, and the VL amino acid sequence of SEQ ID NO: 504, optionally including post-translational modifications of those sequences.

### TSTO1004

[2700] In one aspect, the present disclosure provides an antibody or antigen-binding fragment thereof comprising at least one or both variable regions selected from: a. VH comprising the amino acid sequence of SEQ ID NO: 234 and b. VL comprising the amino acid sequence of SEQ ID NO: 505.

[2701] In one aspect, the present disclosure provides an antibody or antigen-binding fragment thereof comprising at least one, two, three, four, five, or six CDRs selected from: a. CDR-H1 comprising the amino acid sequence of SEQ ID NO: 776, b. CDR-H2 comprising the amino acid sequence of SEQ ID NO: 1318, c. CDR-H3 comprising the amino acid sequence of SEQ ID NO: 1860, d. CDR-L1 comprising the amino acid sequence of SEQ ID NO: 1047, e. CDR-L2 comprising the amino acid sequence of SEQ ID NO: 1589, and f. CDR-L3 comprising the amino acid sequence of SEQ ID NO: 2131.

[2702] In one aspect, the present disclosure provides an antibody or antigen-binding fragment thereof comprising a CDR-H3 comprising the amino acid sequence of SEQ ID NO: 1860, and a CDR-L3 comprising the amino acid sequence of SEQ ID NO: 2131.

[2703] In one aspect, the present disclosure provides an antibody or antigen-binding fragment thereof comprising at least one, at least two, or all three VH CDR sequences selected from: a. CDR-H1 comprising the amino acid sequence of SEQ ID NO: 776, b. CDR-H2 comprising the amino acid sequence of SEQ ID NO: 1318, c. CDR-H3 comprising the amino acid sequence of SEQ ID NO: 1860, and a VL comprising the amino acid sequence of SEQ ID NO: 505.

[2704] In one aspect, the present disclosure provides an antibody or antigen-binding fragment thereof comprising at least one, at least two, or all three VL CDR sequences selected from: a. CDR-L1 comprising the amino acid sequence of SEQ ID NO: 104, b. CDR-L2 comprising the amino acid sequence of SEQ ID NO: 1589, c. CDR-L3 comprising the amino acid sequence of SEQ ID NO: 2131, and a VH comprising the amino acid sequence of SEQ ID NO: 234.

[2705] In one aspect, an antibody or antigen-binding fragment thereof is provided, wherein the antibody or antigen-binding fragment thereof comprises a heavy chain variable domain (VH) having at least 90%, 91%, 92%, 93%, 94%, 95%, 96%, 97%, 98%, 99%, or 100% sequence identity to the amino acid sequence SEQ ID NO: 234. In some embodiments, a VH sequence having at least 90%, 91%, 92%, 93%, 94%, 95%, 96%, 97%, 98%, or 99% identity contains substitutions (e.g., conservative substitutions), insertions, or deletions relative to the reference sequence, but an antibody or antigen-binding fragment thereof comprising that sequence retains the ability to bind to same antigen as of the parent (e.g., cancer associated antigen). In some embodiments, a total of 1 to 10 amino acids have been substituted, inserted and/or deleted in the amino acid sequence SEQ ID NO: 234. In some embodiments, substitutions, insertions, or deletions occur in regions outside the CDRs (e.g., in the FRs). Optionally, the antibody or antigen-binding fragment thereof comprises the VH sequence SEQ ID NO: 234, including one or more post-translational modifications of that sequence. In a particular embodiment, the VH comprises one, two or three CDRs selected from: a. CDR-H1, comprising the amino acid sequence SEQ ID NO: 776, b. CDR-H2, comprising the amino acid sequence SEQ ID NO: 1318, and c. CDR-H3, comprising the amino acid sequence SEQ ID NO: 1860.

[2706] In one aspect, an antibody or antigen-binding fragment thereof is provided, wherein the antibody or antigen-binding fragment thereof comprises a light chain variable domain (VL) having at least 90%, 91%, 92%, 93%, 94%, 95%, 96%, 97%, 98%, 99%, or 100% sequence identity to the amino acid sequence SEQ ID NO: 505. In some embodiments, a VL sequence having at least 90%, 91%, 92%, 93%, 94%, 95%, 96%, 97%, 98%, or 99% identity contains substitutions (e.g., conservative substitutions), insertions, or deletions relative to the reference sequence, but an antibody or antigen-binding fragment thereof comprising that sequence retains the ability to bind to same antigen as the parent (e.g., cancer associated antigen). In some embodiments, a total of 1 to 10 amino acids have been substituted, inserted and/or deleted in the amino acid sequence SEQ ID NO: 505. In some embodiments, the substitutions, insertions, or deletions occur in regions outside the CDRs (e.g., in the FRs). Optionally, the antibody or antigen-binding fragment thereof comprises the VL sequence SEQ ID NO: 505, including one or more post-translational modifications of that sequence. In a particular embodiment, the VL comprises one, two or three CDRs selected from: a. CDR-L1, comprising the amino acid sequence SEQ ID NO: 1047, b. CDR-L2, comprising the amino acid sequence SEQ ID NO: 1589, and c. CDR-L3, comprising the amino acid sequence SEQ ID NO: 2131.

[2707] In one aspect, an antibody or antigen-binding fragment thereof is provided, wherein the antibody or antigen-binding fragment thereof comprises a VH as in any of the embodiments provided above, and a VL as in any of the embodiments provided above. In some embodiments, the antibody or antigen-binding fragment thereof comprises the VH amino acid sequence of SEQ ID NO: 234, and the VL amino acid sequence of SEQ ID NO: 505, optionally including post-translational modifications of those sequences.

### TSTO1005

[2708] In one aspect, the present disclosure provides an antibody or antigen-binding fragment thereof comprising at least one or both variable regions selected from: a. VH comprising the amino acid sequence of SEQ ID NO: 235 and b. VL comprising the amino acid sequence of SEQ ID NO: 506.

[2709] In one aspect, the present disclosure provides an antibody or antigen-binding fragment thereof comprising at least one, two, three, four, five, or six CDRs selected from: a. CDR-H1 comprising the amino acid sequence of SEQ ID NO: 777, b. CDR-H2 comprising the amino acid sequence of SEQ ID NO: 1319, c. CDR-H3 comprising the amino acid sequence of SEQ ID NO: 1861, d. CDR-L1 comprising the amino acid sequence of SEQ ID NO: 1048, e. CDR-L2 comprising the amino acid sequence of SEQ ID NO: 1590, and f. CDR-L3 comprising the amino acid sequence of SEQ ID NO: 2132.

[2710] In one aspect, the present disclosure provides an antibody or antigen-binding fragment thereof comprising a CDR-H3 comprising the amino acid sequence of SEQ ID NO: 1861, and a CDR-L3 comprising the amino acid sequence of SEQ ID NO: 2132.

[2711] In one aspect, the present disclosure provides an antibody or antigen-binding fragment thereof comprising at least one, at least two, or all three VH CDR sequences selected from: a. CDR-H1 comprising the amino acid sequence of SEQ ID NO: 777, b. CDR-H2 comprising the amino acid sequence of SEQ ID NO: 1319, c. CDR-H3 comprising the amino acid sequence of SEQ ID NO: 1861, and a VL comprising the amino acid sequence of SEQ ID NO: 506.

[2712] In one aspect, the present disclosure provides an antibody or antigen-binding fragment thereof comprising at least one, at least two, or all three VL CDR sequences selected from: a. CDR-L1 comprising the amino acid sequence of SEQ ID NO: 1048, b. CDR-L2 comprising the amino acid sequence of SEQ ID NO: 1590, c. CDR-L3 comprising the amino acid sequence of SEQ ID NO: 2132, and a VH comprising the amino acid sequence of SEQ ID NO: 235.

[2713] In one aspect, an antibody or antigen-binding fragment thereof is provided, wherein the antibody or antigen-binding fragment thereof comprises a heavy chain variable domain (VH) having at least 90%, 91%, 92%, 93%, 94%, 95%, 96%, 97%, 98%, 99%, or 100% sequence identity to the amino acid sequence SEQ ID NO: 235. In some embodiments, a VH sequence having at least 90%, 91%, 92%, 93%, 94%, 95%, 96%, 97%, 98%, or 99% identity contains substitutions (e.g., conservative substitutions), insertions, or deletions relative to the reference sequence, but an antibody or antigen-binding fragment thereof comprising that sequence retains the ability to bind to same antigen as of the parent (e.g., cancer associated antigen). In some embodiments, a total of 1 to 10 amino acids have been substituted, inserted and/or deleted in the amino acid sequence SEQ ID NO: 235. In some embodiments, substitutions, insertions, or deletions occur in regions outside the CDRs (e.g., in the FRs). Optionally, the antibody or antigen-binding fragment thereof comprises the VH sequence SEQ ID NO: 235, including one or more post-translational modifications of that sequence. In a particular embodiment, the VH comprises one, two or three CDRs selected from: a. CDR-H1, comprising the amino acid sequence SEQ ID NO: 777, b. CDR-H2, comprising the amino acid sequence SEQ ID NO: 1319, and c. CDR-H3, comprising the amino acid sequence SEQ ID NO: 1861.

[2714] In one aspect, an antibody or antigen-binding fragment thereof is provided, wherein the antibody or antigen-binding fragment thereof comprises a light chain variable domain (VL) having at least 90%, 91%, 92%, 93%, 94%, 95%, 96%, 97%, 98%, 99%, or 100% sequence identity to the amino acid sequence SEQ ID NO: 506. In some embodiments, a VL sequence having at least 90%, 91%, 92%, 93%, 94%, 95%, 96%, 97%, 98%, or 99% identity contains substitutions (e.g., conservative substitutions), insertions, or deletions relative to the reference sequence, but an antibody or antigen-binding fragment thereof comprising that sequence retains the ability to bind to same antigen as the parent (e.g., cancer associated antigen). In some embodiments, a total of 1 to 10 amino acids have been substituted, inserted and/or deleted in the amino acid sequence SEQ ID NO: 506. In some embodiments, the substitutions, insertions, or deletions occur in regions outside the CDRs (e.g., in the FRs). Optionally, the antibody or antigen-binding fragment thereof comprises the VL sequence SEQ ID NO: 506, including one or more post-translational modifications of that sequence. In a particular embodiment, the VL comprises one, two or three CDRs selected from: a. CDR-L1, comprising the amino acid sequence SEQ ID NO: 1048, b. CDR-L2, comprising the amino acid sequence SEQ ID NO: 1590, and c. CDR-L3, comprising the amino acid sequence SEQ ID NO: 2132.

[2715] In one aspect, an antibody or antigen-binding fragment thereof is provided, wherein the antibody or antigen-binding fragment thereof comprises a VH as in any of the embodiments provided above, and a VL as in any of the embodiments provided above. In some embodiments, the antibody or antigen-binding fragment thereof comprises the VH amino acid sequence of SEQ ID NO: 235, and the VL amino acid sequence of SEQ ID NO: 506, optionally including post-translational modifications of those sequences.

### TSTO1006

[2716] In one aspect, the present disclosure provides an antibody or antigen-binding fragment thereof comprising at least one or both variable regions selected from: a. VH comprising the amino acid sequence of SEQ ID NO: 236 and b. VL comprising the amino acid sequence of SEQ ID NO: 507.

[2717] In one aspect, the present disclosure provides an antibody or antigen-binding fragment thereof comprising at least one, two, three, four, five, or six CDRs selected from: a. CDR-H1 comprising the amino acid sequence of SEQ ID NO: 778, b. CDR-H2 comprising the amino acid sequence of SEQ ID NO: 1320, c. CDR-H3 comprising the amino acid sequence of SEQ ID NO: 1862, d. CDR-L1 comprising the amino acid sequence of SEQ ID NO: 1049, e. CDR-L2 comprising the amino acid sequence of SEQ ID NO: 1591, and f. CDR-L3 comprising the amino acid sequence of SEQ ID NO: 2133.

[2718] In one aspect, the present disclosure provides an antibody or antigen-binding fragment thereof comprising a CDR-H3 comprising the amino acid sequence of SEQ ID NO: 1862, and a CDR-L3 comprising the amino acid sequence of SEQ ID NO: 2133.

[2719] In one aspect, the present disclosure provides an antibody or antigen-binding fragment thereof comprising at least one, at least two, or all three VH CDR sequences selected from: a. CDR-H1 comprising the amino acid sequence of SEQ ID NO: 778, b. CDR-H2 comprising the amino acid sequence of SEQ ID NO: 1320, c. CDR-H3 comprising the amino acid sequence of SEQ ID NO: 1862, and a VL comprising the amino acid sequence of SEQ ID NO: 507.

[2720] In one aspect, the present disclosure provides an antibody or antigen-binding fragment thereof comprising at least one, at least two, or all three VL CDR sequences selected from: a. CDR-L1 comprising the amino acid sequence of SEQ ID NO: 1049, b. CDR-L2 comprising the amino acid sequence of SEQ ID NO: 1591, c. CDR-L3 comprising the amino acid sequence of SEQ ID NO: 2133, and a VH comprising the amino acid sequence of SEQ ID NO: 236.

[2721] In one aspect, an antibody or antigen-binding fragment thereof is provided, wherein the antibody or antigen-binding fragment thereof comprises a heavy chain variable domain (VH) having at least 90%, 91%, 92%, 93%, 94%, 95%, 96%, 97%, 98%, 99%, or 100% sequence identity to the amino acid sequence SEQ ID NO: 236. In some embodiments, a VH sequence having at least 90%, 91%, 92%, 93%, 94%, 95%, 96%, 97%, 98%, or 99% identity contains substitutions (e.g., conservative substitutions), insertions, or deletions relative to the reference sequence, but an antibody or antigen-binding fragment thereof comprising that sequence retains the ability to bind to same antigen as of the parent (e.g., cancer associated antigen). In some embodiments, a total of 1 to 10 amino acids have been substituted, inserted and/or deleted in the amino acid sequence SEQ ID NO: 236. In some embodiments, substitutions, insertions, or deletions occur in regions outside the CDRs (e.g., in the FRs). Optionally, the antibody or antigen-binding fragment thereof comprises the VH sequence SEQ ID NO: 236, including one or more post-translational modifications of that sequence. In a particular embodiment, the VH comprises one, two or three CDRs selected from: a. CDR-H1, comprising the amino acid sequence SEQ ID NO: 778, b. CDR-H2, comprising the amino acid sequence SEQ ID NO: 1320, and c. CDR-H3, comprising the amino acid sequence SEQ ID NO: 1862.

[2722] In one aspect, an antibody or antigen-binding fragment thereof is provided, wherein the antibody or antigen-binding fragment thereof comprises a light chain variable domain (VL) having at least 90%, 91%, 92%, 93%, 94%, 95%, 96%, 97%, 98%, 99%, or 100% sequence identity to the amino acid sequence SEQ ID NO: 507. In some embodiments, a VL sequence having at least 90%, 91%, 92%, 93%, 94%, 95%, 96%, 97%, 98%, or 99% identity contains substitutions (e.g., conservative substitutions), insertions, or deletions relative to the reference sequence, but an antibody or antigen-binding fragment thereof comprising that sequence retains the ability to bind to same antigen as the parent (e.g., cancer associated antigen). In some embodiments, a total of 1 to 10 amino acids have been substituted, inserted and/or deleted in the amino acid sequence SEQ ID NO: 507. In some embodiments, the substitutions, insertions, or deletions occur in regions outside the CDRs (e.g., in the FRs). Optionally, the antibody or antigen-binding fragment thereof comprises the VL sequence SEQ ID NO: 507, including one or more post-translational modifications of that sequence. In a particular embodiment, the VL comprises one, two or three CDRs selected from: a. CDR-L1, comprising the amino acid sequence SEQ ID NO: 1049, b. CDR-L2, comprising the amino acid sequence SEQ ID NO: 1591, and c. CDR-L3, comprising the amino acid sequence SEQ ID NO: 2133.

[2723] In one aspect, an antibody or antigen-binding fragment thereof is provided, wherein the antibody or antigen-binding fragment thereof comprises a VH as in any of the embodiments provided above, and a VL as in any of the embodiments provided above. In some embodiments, the antibody or antigen-binding fragment thereof comprises the VH amino acid sequence of SEQ ID NO: 236, and the VL amino acid sequence of SEQ ID NO: 507, optionally including post-translational modifications of those sequences.

### TSTO1007

[2724] In one aspect, the present disclosure provides an antibody or antigen-binding fragment thereof comprising at least one or both variable regions selected from: a. VH comprising the amino acid sequence of SEQ ID NO: 237 and b. VL comprising the amino acid sequence of SEQ ID NO: 508.

[2725] In one aspect, the present disclosure provides an antibody or antigen-binding fragment thereof comprising at least one, two, three, four, five, or six CDRs selected from: a. CDR-H1 comprising the amino acid sequence of SEQ ID NO: 779, b. CDR-H2 comprising the amino acid sequence of SEQ ID NO: 1321, c. CDR-H3 comprising the amino acid sequence of SEQ ID NO: 1863, d. CDR-L1 comprising the amino acid sequence of SEQ ID NO: 1050, e. CDR-L2 comprising the amino acid sequence of SEQ ID NO: 1592, and f. CDR-L3 comprising the amino acid sequence of SEQ ID NO: 2134.

[2726] In one aspect, the present disclosure provides an antibody or antigen-binding fragment thereof comprising a CDR-H3 comprising the amino acid sequence of SEQ ID NO: 1863, and a CDR-L3 comprising the amino acid sequence of SEQ ID NO: 2134.

[2727] In one aspect, the present disclosure provides an antibody or antigen-binding fragment thereof comprising at least one, at least two, or all three VH CDR sequences selected from: a. CDR-H1 comprising the amino acid sequence of SEQ ID NO: 779, b. CDR-H2 comprising the amino acid sequence of SEQ ID NO: 1321, c. CDR-H3 comprising the amino acid sequence of SEQ ID NO: 1863, and a VL comprising the amino acid sequence of SEQ ID NO: 508.

[2728] In one aspect, the present disclosure provides an antibody or antigen-binding fragment thereof comprising at least one, at least two, or all three VL CDR sequences selected from: a. CDR-L1 comprising the amino acid sequence of SEQ ID NO: 1050, b. CDR-L2 comprising the amino acid sequence of SEQ ID NO: 1592, c. CDR-L3 comprising the amino acid sequence of SEQ ID NO: 2134, and a VH comprising the amino acid sequence of SEQ ID NO: 237.

[2729] In one aspect, an antibody or antigen-binding fragment thereof is provided, wherein the antibody or antigen-binding fragment thereof comprises a heavy chain variable domain (VH) having at least 90%, 91%, 92%, 93%, 94%, 95%, 96%, 97%, 98%, 99%, or 100% sequence identity to the amino acid sequence SEQ ID NO: 237. In some embodiments, a VH sequence having at least 90%, 91%, 92%, 93%, 94%, 95%, 96%, 97%, 98%, or 99% identity contains substitutions (e.g., conservative substitutions), insertions, or deletions relative to the reference sequence, but an antibody or antigen-binding fragment thereof comprising that sequence retains the ability to bind to same antigen as of the parent (e.g., cancer associated antigen). In some embodiments, a total of 1 to 10 amino acids have been substituted, inserted and/or deleted in the amino acid sequence SEQ ID NO: 237. In some embodiments, substitutions, insertions, or deletions occur in regions outside the CDRs (e.g., in the FRs). Optionally, the antibody or antigen-binding fragment thereof comprises the VH sequence SEQ ID NO: 237, including one or more post-translational modifications of that sequence. In a particular embodiment, the VH comprises one, two or three CDRs selected from: a. CDR-H1, comprising the amino acid sequence SEQ ID NO: 779, b. CDR-H2, comprising the amino acid sequence SEQ ID NO: 1321, and c. CDR-H3, comprising the amino acid sequence SEQ ID NO: 1863.

[2730] In one aspect, an antibody or antigen-binding fragment thereof is provided, wherein the antibody or antigen-binding fragment thereof comprises a light chain variable domain (VL) having at least 90%, 91%, 92%, 93%, 94%, 95%, 96%, 97%, 98%, 99%, or 100% sequence identity to the amino acid sequence SEQ ID NO: 508. In some embodiments, a VL sequence having at least 90%, 91%, 92%, 93%, 94%, 95%, 96%, 97%, 98%, or 99% identity contains substitutions (e.g., conservative substitutions), insertions, or deletions relative to the reference sequence, but an antibody or antigen-binding fragment thereof comprising that sequence retains the ability to bind to same antigen as the parent (e.g., cancer associated antigen). In some embodiments, a total of 1 to 10 amino acids have been substituted, inserted and/or deleted in the amino acid sequence SEQ ID NO: 508. In some embodiments, the substitutions, insertions, or deletions occur in regions outside the CDRs (e.g., in the FRs). Optionally, the antibody or antigen-binding fragment thereof comprises the VL sequence SEQ ID NO: 508, including one or more post-translational modifications of that sequence. In a particular embodiment, the VL comprises one, two or three CDRs selected from: a. CDR-L1, comprising the amino acid sequence SEQ ID NO: 1050, b. CDR-L2, comprising the amino acid sequence SEQ ID NO: 1592, and c. CDR-L3, comprising the amino acid sequence SEQ ID NO: 2134.

[2731] In one aspect, an antibody or antigen-binding fragment thereof is provided, wherein the antibody or antigen-binding fragment thereof comprises a VH as in any of the embodiments provided above, and a VL as in any of the embodiments provided above. In some embodiments, the antibody or antigen-binding fragment thereof comprises the VH amino acid sequence of SEQ ID NO: 237, and the VL amino acid sequence of SEQ ID NO: 508, optionally including post-translational modifications of those sequences.

### TSTO1008

[2732] In one aspect, the present disclosure provides an antibody or antigen-binding fragment thereof comprising at least one or both variable regions selected from: a. VH comprising the amino acid sequence of SEQ ID NO: 238 and b. VL comprising the amino acid sequence of SEQ ID NO: 509.

[2733] In one aspect, the present disclosure provides an antibody or antigen-binding fragment thereof comprising at least one, two, three, four, five, or six CDRs selected from: a. CDR-H1 comprising the amino acid sequence of SEQ ID NO: 780, b. CDR-H2 comprising the amino acid sequence of SEQ ID NO: 1322, c. CDR-H3 comprising the amino acid sequence of SEQ ID NO: 1864, d. CDR-L1 comprising the amino acid sequence of SEQ ID NO: 1051, e. CDR-L2 comprising the amino acid sequence of SEQ ID NO: 1593, and f. CDR-L3 comprising the amino acid sequence of SEQ ID NO: 2135.

[2734] In one aspect, the present disclosure provides an antibody or antigen-binding fragment thereof comprising a CDR-H3 comprising the amino acid sequence of SEQ ID NO: 1864, and a CDR-L3 comprising the amino acid sequence of SEQ ID NO: 2135.

[2735] In one aspect, the present disclosure provides an antibody or antigen-binding fragment thereof comprising at least one, at least two, or all three VH CDR sequences selected from: a. CDR-H1 comprising the amino acid sequence of SEQ ID NO: 780, b. CDR-H2 comprising the amino acid sequence of SEQ ID NO: 1322, c. CDR-H3 comprising the amino acid sequence of SEQ ID NO: 1864, and a VL comprising the amino acid sequence of SEQ ID NO: 509.

[2736] In one aspect, the present disclosure provides an antibody or antigen-binding fragment thereof comprising at least one, at least two, or all three VL CDR sequences selected from: a. CDR-L1 comprising the amino acid sequence of SEQ ID NO: 1051, b. CDR-L2 comprising the amino acid sequence of SEQ ID NO: 1593, c. CDR-L3 comprising the amino acid sequence of SEQ ID NO: 2135, and a VH comprising the amino acid sequence of SEQ ID NO: 238.

[2737] In one aspect, an antibody or antigen-binding fragment thereof is provided, wherein the antibody or antigen-binding fragment thereof comprises a heavy chain variable domain (VH) having at least 90%, 91%, 92%, 93%, 94%, 95%, 96%, 97%, 98%, 99%, or 100% sequence identity to the amino acid sequence SEQ ID NO: 238. In some embodiments, a VH sequence having at least 90%, 91%, 92%, 93%, 94%, 95%, 96%, 97%, 98%, or 99% identity contains substitutions (e.g., conservative substitutions), insertions, or deletions relative to the reference sequence, but an antibody or antigen-binding fragment thereof comprising that sequence retains the ability to bind to same antigen as of the parent (e.g., cancer associated antigen). In some embodiments, a total of 1 to 10 amino acids have been substituted, inserted and/or deleted in the amino acid sequence SEQ ID NO: 238. In some embodiments, substitutions, insertions, or deletions occur in regions outside the CDRs (e.g., in the FRs). Optionally, the antibody or antigen-binding fragment thereof comprises the VH sequence SEQ ID NO: 238, including one or more post-translational modifications of that sequence. In a particular embodiment, the VH comprises one, two or three CDRs selected from: a. CDR-H1, comprising the amino acid sequence SEQ ID NO: 780, b. CDR-H2, comprising the amino acid sequence SEQ ID NO: 1322, and c. CDR-H3, comprising the amino acid sequence SEQ ID NO: 1864.

[2738] In one aspect, an antibody or antigen-binding fragment thereof is provided, wherein the antibody or antigen-binding fragment thereof comprises a light chain variable domain (VL) having at least 90%, 91%, 92%, 93%, 94%, 95%, 96%, 97%, 98%, 99%, or 100% sequence identity to the amino acid sequence SEQ ID NO: 509. In some embodiments, a VL sequence having at least 90%, 91%, 92%, 93%, 94%, 95%, 96%, 97%, 98%, or 99% identity contains substitutions (e.g., conservative substitutions), insertions, or deletions relative to the reference sequence, but an antibody or antigen-binding fragment thereof comprising that sequence retains the ability to bind to same antigen as the parent (e.g., cancer associated antigen). In some embodiments, a total of 1 to 10 amino acids have been substituted, inserted and/or deleted in the amino acid sequence SEQ ID NO: 509. In some embodiments, the substitutions, insertions, or deletions occur in regions outside the CDRs (e.g., in the FRs). Optionally, the antibody or antigen-binding fragment thereof comprises the VL sequence SEQ ID NO: 509, including one or more post-translational modifications of that sequence. In a particular embodiment, the VL comprises one, two or three CDRs selected from: a. CDR-L1, comprising the amino acid sequence SEQ ID NO: 1051, b. CDR-L2, comprising the amino acid sequence SEQ ID NO: 1593, and c. CDR-L3, comprising the amino acid sequence SEQ ID NO: 2135.

[2739] In one aspect, an antibody or antigen-binding fragment thereof is provided, wherein the antibody or antigen-binding fragment thereof comprises a VH as in any of the embodiments provided above, and a VL as in any of the embodiments provided above. In some embodiments, the antibody or antigen-binding fragment thereof comprises the VH amino acid sequence of SEQ ID NO: 238, and the VL amino acid sequence of SEQ ID NO: 509, optionally including post-translational modifications of those sequences.

### TSTO1009

[2740] In one aspect, the present disclosure provides an antibody or antigen-binding fragment thereof comprising at least one or both variable regions selected from: a. VH comprising the amino acid sequence of SEQ ID NO: 239 and b. VL comprising the amino acid sequence of SEQ ID NO: 510.

[2741] In one aspect, the present disclosure provides an antibody or antigen-binding fragment thereof comprising at least one, two, three, four, five, or six CDRs selected from: a. CDR-H1 comprising the amino acid sequence of SEQ ID NO: 781, b. CDR-H2 comprising the amino acid sequence of SEQ ID NO: 1323, c. CDR-H3 comprising the amino acid sequence of SEQ ID NO: 1865, d. CDR-L1 comprising the amino acid sequence of SEQ ID NO: 1052, e. CDR-L2 comprising the amino acid sequence of SEQ ID NO: 1594, and f. CDR-L3 comprising the amino acid sequence of SEQ ID NO: 2136.

[2742] In one aspect, the present disclosure provides an antibody or antigen-binding fragment thereof comprising a CDR-H3 comprising the amino acid sequence of SEQ ID NO: 1865, and a CDR-L3 comprising the amino acid sequence of SEQ ID NO: 2136.

[2743] In one aspect, the present disclosure provides an antibody or antigen-binding fragment thereof comprising at least one, at least two, or all three VH CDR sequences selected from: a. CDR-H1 comprising the amino acid sequence of SEQ ID NO: 781, b. CDR-H2 comprising the amino acid sequence of SEQ ID NO: 1323, c. CDR-H3 comprising the amino acid sequence of SEQ ID NO: 1865, and a VL comprising the amino acid sequence of SEQ ID NO: 510.

[2744] In one aspect, the present disclosure provides an antibody or antigen-binding fragment thereof comprising at least one, at least two, or all three VL CDR sequences selected from: a. CDR-L1 comprising the amino acid sequence of SEQ ID NO: 1052, b. CDR-L2 comprising the amino acid sequence of SEQ ID NO: 1594, c. CDR-L3 comprising the amino acid sequence of SEQ ID NO: 2136, and a VH comprising the amino acid sequence of SEQ ID NO: 239.

[2745] In one aspect, an antibody or antigen-binding fragment thereof is provided, wherein the antibody or antigen-binding fragment thereof comprises a heavy chain variable domain (VH) having at least 90%, 91%, 92%, 93%, 94%, 95%, 96%, 97%, 98%, 99%, or 100% sequence identity to the amino acid sequence SEQ ID NO: 239. In some embodiments, a VH sequence having at least 90%, 91%, 92%, 93%, 94%, 95%, 96%, 97%, 98%, or 99% identity contains substitutions (e.g., conservative substitutions), insertions, or deletions relative to the reference sequence, but an antibody or antigen-binding fragment thereof comprising that sequence retains the ability to bind to same antigen as of the parent (e.g., cancer associated antigen). In some embodiments, a total of 1 to 10 amino acids have been substituted, inserted and/or deleted in the amino acid sequence SEQ ID NO: 239. In some embodiments, substitutions, antigen-binding fragment thereof comprises the VH sequence SEQ ID NO: 239, including one or more post-translational modifications of that sequence. In a particular embodiment, the VH comprises one, two or three CDRs selected from: a. CDR-H1, comprising the amino acid sequence SEQ ID NO: 781, b. CDR-H2, comprising the amino acid sequence SEQ ID NO: 1323, and c. CDR-H3, comprising the amino acid sequence SEQ ID NO: 1865.

[2746] In one aspect, an antibody or antigen-binding fragment thereof is provided, wherein the antibody or antigen-binding fragment thereof comprises a light chain variable domain (VL) having at least 90%, 91%, 92%, 93%, 94%, 95%, 96%, 97%, 98%, 99%, or 100% sequence identity to the amino acid sequence SEQ ID NO: 510. In some embodiments, a VL sequence having at least 90%, 91%, 92%, 93%, 94%, 95%, 96%, 97%, 98%, or 99% identity contains substitutions (e.g., conservative substitutions), insertions, or deletions relative to the reference sequence, but an antibody or antigen-binding fragment thereof comprising that sequence retains the ability to bind to same antigen as the parent (e.g., cancer associated antigen). In some embodiments, a total of 1 to 10 amino acids have been substituted, inserted and/or deleted in the amino acid sequence SEQ ID NO: 510. In some embodiments, the substitutions, insertions, or deletions occur in regions outside the CDRs (e.g., in the FRs). Optionally, the antibody or antigen-binding fragment thereof comprises the VL sequence SEQ ID NO: 510, including one or more post-translational modifications of that sequence. In a particular embodiment, the VL comprises one, two or three CDRs selected from: a. CDR-L1, comprising the amino acid sequence SEQ ID NO: 1052, b. CDR-L2, comprising the amino acid sequence SEQ ID NO: 1594, and c. CDR-L3, comprising the amino acid sequence SEQ ID NO: 2136.

[2747] In one aspect, an antibody or antigen-binding fragment thereof is provided, wherein the antibody or antigen-binding fragment thereof comprises a VH as in any of the embodiments provided above, and a VL as in any of the embodiments provided above. In some embodiments, the antibody or antigen-binding fragment thereof comprises the VH amino acid sequence of SEQ ID NO: 239, and the VL amino acid sequence of SEQ ID NO: 510, optionally including post-translational modifications of those sequences.

### TSTO1010

[2748] In one aspect, the present disclosure provides an antibody or antigen-binding fragment thereof comprising at least one or both variable regions selected from: a. VH comprising the amino acid sequence of SEQ ID NO: 240 and b. VL comprising the amino acid sequence of SEQ ID NO: 511.

[2749] In one aspect, the present disclosure provides an antibody or antigen-binding fragment thereof comprising at least one, two, three, four, five, or six CDRs selected from: a. CDR-H1 comprising the amino acid sequence of SEQ ID NO: 782, b. CDR-H2 comprising the amino acid sequence of SEQ ID NO: 1324, c. CDR-H3 comprising the amino acid sequence of SEQ ID NO: 1866, d. CDR-L1 comprising the amino acid sequence of SEQ ID NO: 1053, e. CDR-L2 comprising the amino acid sequence of SEQ ID NO: 1595, and f. CDR-L3 comprising the amino acid sequence of SEQ ID NO: 2137.

[2750] In one aspect, the present disclosure provides an antibody or antigen-binding fragment thereof comprising a CDR-H3 comprising the amino acid sequence of SEQ ID NO: 1866, and a CDR-L3 comprising the amino acid sequence of SEQ ID NO: 2137.

[2751] In one aspect, the present disclosure provides an antibody or antigen-binding fragment thereof comprising at least one, at least two, or all three VH CDR sequences selected from: a. CDR-H1 comprising the amino acid sequence of SEQ ID NO: 782, b. CDR-H2 comprising the amino acid sequence of SEQ ID NO: 1324, c. CDR-H3 comprising the amino acid sequence of SEQ ID NO: 1866, and a VL comprising the amino acid sequence of SEQ ID NO: 511.

[2752] In one aspect, the present disclosure provides an antibody or antigen-binding fragment thereof comprising at least one, at least two, or all three VL CDR sequences selected from: a. CDR-L1 comprising the amino acid sequence of SEQ ID NO: 1053, b. CDR-L2 comprising the amino acid sequence of SEQ ID NO: 1595, c. CDR-L3 comprising the amino acid sequence of SEQ ID NO: 2137, and a VH comprising the amino acid sequence of SEQ ID NO: 240.

[2753] In one aspect, an antibody or antigen-binding fragment thereof is provided, wherein the antibody or antigen-binding fragment thereof comprises a heavy chain variable domain (VH) having at least 90%, 91%, 92%, 93%, 94%, 95%, 96%, 97%, 98%, 99%, or 100% sequence identity to the amino acid sequence SEQ ID NO: 240. In some embodiments, a VH sequence having at least 90%, 91%, 92%, 93%, 94%, 95%, 96%, 97%, 98%, or 99% identity contains substitutions (e.g., conservative substitutions), insertions, or deletions relative to the reference sequence, but an antibody or antigen-binding fragment thereof comprising that sequence retains the ability to bind to same antigen as of the parent (e.g., cancer associated antigen). In some embodiments, a total of 1 to 10 amino acids have been substituted, inserted and/or deleted in the amino acid sequence SEQ ID NO: 240. In some embodiments, substitutions, insertions, or deletions occur in regions outside the CDRs (e.g., in the FRs). Optionally, the antibody or antigen-binding fragment thereof comprises the VH sequence SEQ ID NO: 240, including one or more post-translational modifications of that sequence. In a particular embodiment, the VH comprises one, two or three CDRs selected from: a. CDR-H1, comprising the amino acid sequence SEQ ID NO: 782, b. CDR-H2, comprising the amino acid sequence SEQ ID NO: 1324, and c. CDR-H3, comprising the amino acid sequence SEQ ID NO: 1866.

[2754] In one aspect, an antibody or antigen-binding fragment thereof is provided, wherein the antibody or antigen-binding fragment thereof comprises a light chain variable domain (VL) having at least 90%, 91%, 92%, 93%, 94%, 95%, 96%, 97%, 98%, 99%, or 100% sequence identity to the amino acid sequence SEQ ID NO: 511. In some embodiments, a VL sequence having at least 90%, 91%, 92%, 93%, 94%, 95%, 96%, 97%, 98%, or 99% identity contains substitutions (e.g., conservative substitutions), insertions, or deletions relative to the reference sequence, but an antibody or antigen-binding fragment thereof comprising that sequence retains the ability to bind to same antigen as the parent (e.g., cancer associated antigen). In some embodiments, a total of 1 to 10 amino acids have been substituted, inserted and/or deleted in the amino acid sequence SEQ ID NO: 511. In some embodiments, the substitutions, insertions, or deletions occur in regions outside the CDRs (e.g., in the FRs). Optionally, the antibody or antigen-binding fragment thereof comprises the VL sequence SEQ ID NO: 511, including one or more post-translational modifications of that sequence. In a particular embodiment, the VL comprises one, two or three CDRs selected from: a. CDR-L1, comprising the amino acid sequence SEQ ID NO: 1053, b. CDR-L2, comprising the amino acid sequence SEQ ID NO: 1595, and c. CDR-L3, comprising the amino acid sequence SEQ ID NO: 2137.

[2755] In one aspect, an antibody or antigen-binding fragment thereof is provided, wherein the antibody or antigen-binding fragment thereof comprises a VH as in any of the embodiments provided above, and a VL as in any of the embodiments provided above. In some embodiments, the antibody or antigen-binding fragment thereof comprises the VH amino acid sequence of SEQ ID NO: 240, and the VL amino acid sequence of SEQ ID NO: 511, optionally including post-translational modifications of those sequences.

### TTES1001

[2756] In one aspect, the present disclosure provides an antibody or antigen-binding fragment thereof comprising at least one or both variable regions selected from: a. VH comprising the amino acid sequence of SEQ ID NO: 241 and b. VL comprising the amino acid sequence of SEQ ID NO: 512.

[2757] In one aspect, the present disclosure provides an antibody or antigen-binding fragment thereof comprising at least one, two, three, four, five, or six CDRs selected from: a. CDR-H1 comprising the amino acid sequence of SEQ ID NO: 783, b. CDR-H2 comprising the amino acid sequence of SEQ ID NO: 1325, c. CDR-H3 comprising the amino acid sequence of SEQ ID NO: 1867, d. CDR-L1 comprising the amino acid sequence of SEQ ID NO: 1054, e. CDR-L2 comprising the amino acid sequence of SEQ ID NO: 1596, and f. CDR-L3 comprising the amino acid sequence of SEQ ID NO: 2138.

[2758] In one aspect, the present disclosure provides an antibody or antigen-binding fragment thereof comprising a CDR-H3 comprising the amino acid sequence of SEQ ID NO: 1867, and a CDR-L3 comprising the amino acid sequence of SEQ ID NO: 2138.

[2759] In one aspect, the present disclosure provides an antibody or antigen-binding fragment thereof comprising at least one, at least two, or all three VH CDR sequences selected from: a. CDR-H1 comprising the amino acid sequence of SEQ ID NO: 783, b. CDR-H2 comprising the amino acid sequence of SEQ ID NO: 1325, c. CDR-H3 comprising the amino acid sequence of SEQ ID NO: 1867, and a VL comprising the amino acid sequence of SEQ ID NO: 512.

[2760] In one aspect, the present disclosure provides an antibody or antigen-binding fragment thereof comprising at least one, at least two, or all three VL CDR sequences selected from: a. CDR-L1 comprising the amino acid sequence of SEQ ID NO: 1054, b. CDR-L2 comprising the amino acid sequence of SEQ ID NO: 1596, c. CDR-L3 comprising the amino acid sequence of SEQ ID NO: 2138, and a VH comprising the amino acid sequence of SEQ ID NO: 241.

[2761] In one aspect, an antibody or antigen-binding fragment thereof is provided, wherein the antibody or antigen-binding fragment thereof comprises a heavy chain variable domain (VH) having at least 90%, 91%, 92%, 93%, 94%, 95%, 96%, 97%, 98%, 99%, or 100% sequence identity to the amino acid sequence SEQ ID NO: 241. In some embodiments, a VH sequence having at least 90%, 91%, 92%, 93%, 94%, 95%, 96%, 97%, 98%, or 99% identity contains substitutions (e.g., conservative substitutions), insertions, or deletions relative to the reference sequence, but an antibody or antigen-binding fragment thereof comprising that sequence retains the ability to bind to same antigen as of the parent (e.g., cancer associated antigen). In some embodiments, a total of 1 to 10 amino acids have been substituted, inserted and/or deleted in the amino acid sequence SEQ ID NO: 241. In some embodiments, substitutions, insertions, or deletions occur in regions outside the CDRs (e.g., in the FRs). Optionally, the antibody or antigen-binding fragment thereof comprises the VH sequence SEQ ID NO: 241, including one or more post-translational modifications of that sequence. In a particular embodiment, the VH comprises one, two or three CDRs selected from: a. CDR-H1, comprising the amino acid sequence SEQ ID NO: 783, b. CDR-H2, comprising the amino acid sequence SEQ ID NO: 1325, and c. CDR-H3, comprising the amino acid sequence SEQ ID NO: 1867.

[2762] In one aspect, an antibody or antigen-binding fragment thereof is provided, wherein the antibody or antigen-binding fragment thereof comprises a light chain variable domain (VL) having at least 90%, 91%, 92%, 93%, 94%, 95%, 96%, 97%, 98%, 99%, or 100% sequence identity to the amino acid sequence SEQ ID NO: 512. In some embodiments, a VL sequence having at least 90%, 91%, 92%, 93%, 94%, 95%, 96%, 97%, 98%, or 99% identity contains substitutions (e.g., conservative substitutions), insertions, or deletions relative to the reference sequence, but an antibody or antigen-binding fragment thereof comprising that sequence retains the ability to bind to same antigen as the parent (e.g., cancer associated antigen). In some embodiments, a total of 1 to 10 amino acids have been substituted, inserted and/or deleted in the amino acid sequence SEQ ID NO: 512. In some embodiments, the substitutions, insertions, or deletions occur in regions outside the CDRs (e.g., in the FRs). Optionally, the antibody or antigen-binding fragment thereof comprises the VL sequence SEQ ID NO: 512, including one or more post-translational modifications of that sequence. In a particular embodiment, the VL comprises one, two or three CDRs selected from: a. CDR-L1, comprising the amino acid sequence SEQ ID NO: 1054, b. CDR-L2, comprising the amino acid sequence SEQ ID NO: 1596, and c. CDR-L3, comprising the amino acid sequence SEQ ID NO: 2138.

[2763] In one aspect, an antibody or antigen-binding fragment thereof is provided, wherein the antibody or antigen-binding fragment thereof comprises a VH as in any of the embodiments provided above, and a VL as in any of the embodiments provided above. In some embodiments, the antibody or antigen-binding fragment thereof comprises the VH amino acid sequence of SEQ ID NO: 241, and the VL amino acid sequence of SEQ ID NO: 512, optionally including post-translational modifications of those sequences.

### TTES1002

[2764] In one aspect, the present disclosure provides an antibody or antigen-binding fragment thereof comprising at least one or both variable regions selected from: a. VH comprising the amino acid sequence of SEQ ID NO: 242 and b. VL comprising the amino acid sequence of SEQ ID NO: 513.

[2765] In one aspect, the present disclosure provides an antibody or antigen-binding fragment thereof comprising at least one, two, three, four, five, or six CDRs selected from: a. CDR-H1 comprising the amino acid sequence of SEQ ID NO: 784, b. CDR-H2 comprising the amino acid sequence of SEQ ID NO: 1326, c. CDR-H3 comprising the amino acid sequence of SEQ ID NO: 1868, d. CDR-L1 comprising the amino acid sequence of SEQ ID NO: 1055, e. CDR-L2 comprising the amino acid sequence of SEQ ID NO: 1597, and f. CDR-L3 comprising the amino acid sequence of SEQ ID NO: 2139.

[2766] In one aspect, the present disclosure provides an antibody or antigen-binding fragment thereof comprising a CDR-H3 comprising the amino acid sequence of SEQ ID NO: 1868, and a CDR-L3 comprising the amino acid sequence of SEQ ID NO: 2139.

[2767] In one aspect, the present disclosure provides an antibody or antigen-binding fragment thereof comprising at least one, at least two, or all three VH CDR sequences selected from: a. CDR-H1 comprising the amino acid sequence of SEQ ID NO: 784, b. CDR-H2 comprising the amino acid sequence of SEQ ID NO: 1326, c. CDR-H3 comprising the amino acid sequence of SEQ ID NO: 1868, and a. VL comprising the amino acid sequence of SEQ ID NO: 513.

[2768] In one aspect, the present disclosure provides an antibody or antigen-binding fragment thereof comprising at least one, at least two, or all three VL CDR sequences selected from: a. CDR-L1 comprising the amino acid sequence of SEQ ID NO: 1055, b. CDR-L2 comprising the amino acid sequence of SEQ ID NO: 1597, c. CDR-L3 comprising the amino acid sequence of SEQ ID NO: 2139, and a. VH comprising the amino acid sequence of SEQ ID NO: 242.

[2769] In one aspect, an antibody or antigen-binding fragment thereof is provided, wherein the antibody or antigen-binding fragment thereof comprises a heavy chain variable domain (VH) having at least 90%, 91%, 92%, 93%, 94%, 95%, 96%, 97%, 98%, 99%, or 100% sequence identity to the amino acid sequence SEQ ID NO: 242. In some embodiments, a VH sequence having at least 90%, 91%, 92%, 93%, 94%, 95%, 96%, 97%, 98%, or 99% identity contains substitutions (e.g., conservative substitutions), insertions, or deletions relative to the reference sequence, but an antibody or antigen-binding fragment thereof comprising that sequence retains the ability to bind to same antigen as of the parent (e.g., cancer associated antigen). In some embodiments, a total of 1 to 10 amino acids have been substituted, inserted and/or deleted in the amino acid sequence SEQ ID NO: 242. In some embodiments, substitutions, insertions, or deletions occur in regions outside the CDRs (e.g., in the FRs). Optionally, the antibody or antigen-binding fragment thereof comprises the VH sequence SEQ ID NO: 242, including one or more post-translational modifications of that sequence. In a particular embodiment, the VH comprises one, two or three CDRs selected from: a. CDR-H1, comprising the amino acid sequence SEQ ID NO: 784, b. CDR-H2, comprising the amino acid sequence SEQ ID NO: 1326, and c. CDR-H3, comprising the amino acid sequence SEQ ID NO: 1868.

[2770] In one aspect, an antibody or antigen-binding fragment thereof is provided, wherein the antibody or antigen-binding fragment thereof comprises a light chain variable domain (VL) having at least 90%, 91%, 92%, 93%, 94%, 95%, 96%, 97%, 98%, 99%, or 100% sequence identity to the amino acid sequence SEQ ID NO: 513. In some embodiments, a VL sequence having at least 90%, 91%, 92%, 93%, 94%, 95%, 96%, 97%, 98%, or 99% identity contains substitutions (e.g., conservative substitutions), insertions, or deletions relative to the reference sequence, but an antibody or antigen-binding fragment thereof comprising that sequence retains the ability to bind to same antigen as the parent (e.g., cancer associated antigen). In some embodiments, a total of 1 to 10 amino acids have been substituted, inserted and/or deleted in the amino acid sequence SEQ ID NO: 513. In some embodiments, the substitutions, antigen-binding fragment thereof comprises the VL sequence SEQ ID NO: 513, including one or more post-translational modifications of that sequence. In a particular embodiment, the VL comprises one, two or three CDRs selected from: a. CDR-L1, comprising the amino acid sequence SEQ ID NO: 1055, b. CDR-L2, comprising the amino acid sequence SEQ ID NO: 1597, and c. CDR-L3, comprising the amino acid sequence SEQ ID NO: 2139.

[2771] In one aspect, an antibody or antigen-binding fragment thereof is provided, wherein the antibody or antigen-binding fragment thereof comprises a VH as in any of the embodiments provided above, and a VL as in any of the embodiments provided above. In some embodiments, the antibody or antigen-binding fragment thereof comprises the VH amino acid sequence of SEQ ID NO: 242, and the VL amino acid sequence of SEQ ID NO: 513, optionally including post-translational modifications of those sequences.

### TTES1003

[2772] In one aspect, the present disclosure provides an antibody or antigen-binding fragment thereof comprising at least one or both variable regions selected from: a. VH comprising the amino acid sequence of SEQ ID NO: 243 and b. VL comprising the amino acid sequence of SEQ ID NO: 514.

[2773] In one aspect, the present disclosure provides an antibody or antigen-binding fragment thereof comprising at least one, two, three, four, five, or six CDRs selected from: a. CDR-H1 comprising the amino acid sequence of SEQ ID NO: 785, b. CDR-H2 comprising the amino acid sequence of SEQ ID NO: 1327, c. CDR-H3 comprising the amino acid sequence of SEQ ID NO: 1869, d. CDR-L1 comprising the amino acid sequence of SEQ ID NO: 1056, e. CDR-L2 comprising the amino acid sequence of SEQ ID NO: 1598, and f. CDR-L3 comprising the amino acid sequence of SEQ ID NO: 2140.

[2774] In one aspect, the present disclosure provides an antibody or antigen-binding fragment thereof comprising a CDR-H3 comprising the amino acid sequence of SEQ ID NO: 1869, and a CDR-L3 comprising the amino acid sequence of SEQ ID NO: 2140.

[2775] In one aspect, the present disclosure provides an antibody or antigen-binding fragment thereof comprising at least one, at least two, or all three VH CDR sequences selected from: a. CDR-H1 comprising the amino acid sequence of SEQ ID NO: 785, b. CDR-H2 comprising the amino acid sequence of SEQ ID NO: 1327, c. CDR-H3 comprising the amino acid sequence of SEQ ID NO: 1869, and a VL comprising the amino acid sequence of SEQ ID NO: 514.

[2776] In one aspect, the present disclosure provides an antibody or antigen-binding fragment thereof comprising at least one, at least two, or all three VL CDR sequences selected from: a. CDR-L1 comprising the amino acid sequence of SEQ ID NO: 1056, b. CDR-L2 comprising the amino acid sequence of SEQ ID NO: 1598, c. CDR-L3 comprising the amino acid sequence of SEQ ID NO: 2140, and a VH comprising the amino acid sequence of SEQ ID NO: 243.

[2777] In one aspect, an antibody or antigen-binding fragment thereof is provided, wherein the antibody or antigen-binding fragment thereof comprises a heavy chain variable domain (VH) having at least 90%, 91%, 92%, 93%, 94%, 95%, 96%, 97%, 98%, 99%, or 100% sequence identity to the amino acid sequence SEQ ID NO: 243. In some embodiments, a VH sequence having at least 90%, 91%, 92%, 93%, 94%, 95%, 96%, 97%, 98%, or 99% identity contains substitutions (e.g., conservative substitutions), thereof comprising that sequence retains the ability to bind to same antigen as of the parent (e.g., cancer associated antigen). In some embodiments, a total of 1 to 10 amino acids have been substituted, inserted and/or deleted in the amino acid sequence SEQ ID NO: 243. In some embodiments, substitutions, insertions, or deletions occur in regions outside the CDRs (e.g., in the FRs). Optionally, the antibody or antigen-binding fragment thereof comprises the VH sequence SEQ ID NO: 243, including one or more post-translational modifications of that sequence. In a particular embodiment, the VH comprises one, two or three CDRs selected from: a. CDR-H1, comprising the amino acid sequence SEQ ID NO: 785, b. CDR-H2, comprising the amino acid sequence SEQ ID NO: 1327, and c. CDR-H3, comprising the amino acid sequence SEQ ID NO: 1869.

[2778] In one aspect, an antibody or antigen-binding fragment thereof is provided, wherein the antibody or antigen-binding fragment thereof comprises a light chain variable domain (VL) having at least 90%, 91%, 92%, 93%, 94%, 95%, 96%, 97%, 98%, 99%, or 100% sequence identity to the amino acid sequence SEQ ID NO: 514. In some embodiments, a VL sequence having at least 90%, 91%, 92%, 93%, 94%, 95%, 96%, 97%, 98%, or 99% identity contains substitutions (e.g., conservative substitutions), insertions, or deletions relative to the reference sequence, but an antibody or antigen-binding fragment thereof comprising that sequence retains the ability to bind to same antigen as the parent (e.g., cancer associated antigen). In some embodiments, a total of 1 to 10 amino acids have been substituted, inserted and/or deleted in the amino acid sequence SEQ ID NO: 514. In some embodiments, the substitutions, insertions, or deletions occur in regions outside the CDRs (e.g., in the FRs). Optionally, the antibody or antigen-binding fragment thereof comprises the VL sequence SEQ ID NO: 514, including one or more post-translational modifications of that sequence. In a particular embodiment, the VL comprises one, two or three CDRs selected from: a. CDR-L1, comprising the amino acid sequence SEQ ID NO: 1056, b. CDR-L2, comprising the amino acid sequence SEQ ID NO: 1598, and c. CDR-L3, comprising the amino acid sequence SEQ ID NO: 2140.

[2779] In one aspect, an antibody or antigen-binding fragment thereof is provided, wherein the antibody or antigen-binding fragment thereof comprises a VH as in any of the embodiments provided above, and a VL as in any of the embodiments provided above. In some embodiments, the antibody or antigen-binding fragment thereof comprises the VH amino acid sequence of SEQ ID NO: 243, and the VL amino acid sequence of SEQ ID NO: 514, optionally including post-translational modifications of those sequences.

### TTES1004

[2780] In one aspect, the present disclosure provides an antibody or antigen-binding fragment thereof comprising at least one or both variable regions selected from: a. VH comprising the amino acid sequence of SEQ ID NO: 244 and b. VL comprising the amino acid sequence of SEQ ID NO: 515.

[2781] In one aspect, the present disclosure provides an antibody or antigen-binding fragment thereof comprising at least one, two, three, four, five, or six CDRs selected from: a. CDR-H1 comprising the amino acid sequence of SEQ ID NO: 786, b. CDR-H2 comprising the amino acid sequence of SEQ ID NO: 1328, c. CDR-H3 comprising the amino acid sequence of SEQ ID NO: 1870, d. CDR-L1 comprising the amino acid sequence of SEQ ID NO: 1057, e. CDR-L2 comprising the amino acid sequence of SEQ ID NO: 1599, and f. CDR-L3 comprising the amino acid sequence of SEQ ID NO: 2141.

[2782] In one aspect, the present disclosure provides an antibody or antigen-binding fragment thereof comprising a CDR-H3 comprising the amino acid sequence of SEQ ID NO: 1870, and a CDR-L3 comprising the amino acid sequence of SEQ ID NO: 2141.

[2783] In one aspect, the present disclosure provides an antibody or antigen-binding fragment thereof comprising at least one, at least two, or all three VH CDR sequences selected from: a. CDR-H1 comprising the amino acid sequence of SEQ ID NO: 786, b. CDR-H2 comprising the amino acid sequence of SEQ ID NO: 1328, c. CDR-H3 comprising the amino acid sequence of SEQ ID NO: 1870, and a. VL comprising the amino acid sequence of SEQ ID NO: 515.

[2784] In one aspect, the present disclosure provides an antibody or antigen-binding fragment thereof comprising at least one, at least two, or all three VL CDR sequences selected from: a. CDR-L1 comprising the amino acid sequence of SEQ ID NO: 1057, b. CDR-L2 comprising the amino acid sequence of SEQ ID NO: 1599, c. CDR-L3 comprising the amino acid sequence of SEQ ID NO: 2141, and d. VH comprising the amino acid sequence of SEQ ID NO: 244.

[2785] In one aspect, an antibody or antigen-binding fragment thereof is provided, wherein the antibody or antigen-binding fragment thereof comprises a heavy chain variable domain (VH) having at least 90%, 91%, 92%, 93%, 94%, 95%, 96%, 97%, 98%, 99%, or 100% sequence identity to the amino acid sequence SEQ ID NO: 244. In some embodiments, a VH sequence having at least 90%, 91%, 92%, 93%, 94%, 95%, 96%, 97%, 98%, or 99% identity contains substitutions (e.g., conservative substitutions), insertions, or deletions relative to the reference sequence, but an antibody or antigen-binding fragment thereof comprising that sequence retains the ability to bind to same antigen as of the parent (e.g., cancer associated antigen). In some embodiments, a total of 1 to 10 amino acids have been substituted, inserted and/or deleted in the amino acid sequence SEQ ID NO: 244. In some embodiments, substitutions, insertions, or deletions occur in regions outside the CDRs (e.g., in the FRs). Optionally, the antibody or antigen-binding fragment thereof comprises the VH sequence SEQ ID NO: 244, including one or more post-translational modifications of that sequence. In a particular embodiment, the VH comprises one, two or three CDRs selected from: a. CDR-H1, comprising the amino acid sequence SEQ ID NO: 786, b. CDR-H2, comprising the amino acid sequence SEQ ID NO: 1328, and c. CDR-H3, comprising the amino acid sequence SEQ ID NO: 1870.

[2786] In one aspect, an antibody or antigen-binding fragment thereof is provided, wherein the antibody or antigen-binding fragment thereof comprises a light chain variable domain (VL) having at least 90%, 91%, 92%, 93%, 94%, 95%, 96%, 97%, 98%, 99%, or 100% sequence identity to the amino acid sequence SEQ ID NO: 515. In some embodiments, a VL sequence having at least 90%, 91%, 92%, 93%, 94%, 95%, 96%, 97%, 98%, or 99% identity contains substitutions (e.g., conservative substitutions), insertions, or deletions relative to the reference sequence, but an antibody or antigen-binding fragment thereof comprising that sequence retains the ability to bind to same antigen as the parent (e.g., cancer associated antigen). In some embodiments, a total of 1 to 10 amino acids have been substituted, inserted and/or deleted in the amino acid sequence SEQ ID NO: 515. In some embodiments, the substitutions, insertions, or deletions occur in regions outside the CDRs (e.g., in the FRs). Optionally, the antibody or antigen-binding fragment thereof comprises the VL sequence SEQ ID NO: 515, including one or more post-translational modifications of that sequence. In a particular embodiment, the VL comprises one, two or three CDRs selected from: a. CDR-L1, comprising the amino acid sequence SEQ ID NO: 1057, b. CDR-L2, comprising the amino acid sequence SEQ ID NO: 1599, and c. CDR-L3, comprising the amino acid sequence SEQ ID NO: 2141.

[2787] In one aspect, an antibody or antigen-binding fragment thereof is provided, wherein the antibody or antigen-binding fragment thereof comprises a VH as in any of the embodiments provided above, and a VL as in any of the embodiments provided above. In some embodiments, the antibody or antigen-binding fragment thereof comprises the VH amino acid sequence of SEQ ID NO: 244, and the VL amino acid sequence of SEQ ID NO: 515, optionally including post-translational modifications of those sequences.

### TTES1005

[2788] In one aspect, the present disclosure provides an antibody or antigen-binding fragment thereof comprising at least one or both variable regions selected from: a. VH comprising the amino acid sequence of SEQ ID NO: 245 and b. VL comprising the amino acid sequence of SEQ ID NO: 516.

[2789] In one aspect, the present disclosure provides an antibody or antigen-binding fragment thereof comprising at least one, two, three, four, five, or six CDRs selected from: a. CDR-H1 comprising the amino acid sequence of SEQ ID NO: 787, b. CDR-H2 comprising the amino acid sequence of SEQ ID NO: 1329, c. CDR-H3 comprising the amino acid sequence of SEQ ID NO: 1871, d. CDR-L1 comprising the amino acid sequence of SEQ ID NO: 1058, e. CDR-L2 comprising the amino acid sequence of SEQ ID NO: 1600, and f. CDR-L3 comprising the amino acid sequence of SEQ ID NO: 2142.

[2790] In one aspect, the present disclosure provides an antibody or antigen-binding fragment thereof comprising a CDR-H3 comprising the amino acid sequence of SEQ ID NO: 1871, and a CDR-L3 comprising the amino acid sequence of SEQ ID NO: 2142.

[2791] In one aspect, the present disclosure provides an antibody or antigen-binding fragment thereof comprising at least one, at least two, or all three VH CDR sequences selected from: a. CDR-H1 comprising the amino acid sequence of SEQ ID NO: 787, b. CDR-H2 comprising the amino acid sequence of SEQ ID NO: 1329, c. CDR-H3 comprising the amino acid sequence of SEQ ID NO: 1871, and d. VL comprising the amino acid sequence of SEQ ID NO: 516.

[2792] In one aspect, the present disclosure provides an antibody or antigen-binding fragment thereof comprising at least one, at least two, or all three VL CDR sequences selected from: a. CDR-L1 comprising the amino acid sequence of SEQ ID NO: 1058, b. CDR-L2 comprising the amino acid sequence of SEQ ID NO: 1600, c. CDR-L3 comprising the amino acid sequence of SEQ ID NO: 2142, and a VH comprising the amino acid sequence of SEQ ID NO: 245.

[2793] In one aspect, an antibody or antigen-binding fragment thereof is provided, wherein the antibody or antigen-binding fragment thereof comprises a heavy chain variable domain (VH) having at least 90%, 91%, 92%, 93%, 94%, 95%, 96%, 97%, 98%, 99%, or 100% sequence identity to the amino acid sequence SEQ ID NO: 245. In some embodiments, a VH sequence having at least 90%, 91%, 92%, 93%, 94%, 95%, 96%, 97%, 98%, or 99% identity contains substitutions (e.g., conservative substitutions), insertions, or deletions relative to the reference sequence, but an antibody or antigen-binding fragment thereof comprising that sequence retains the ability to bind to same antigen as of the parent (e.g., cancer associated antigen). In some embodiments, a total of 1 to 10 amino acids have been substituted, inserted and/or deleted in the amino acid sequence SEQ ID NO: 245. In some embodiments, substitutions, insertions, or deletions occur in regions outside the CDRs (e.g., in the FRs). Optionally, the antibody or antigen-binding fragment thereof comprises the VH sequence SEQ ID NO: 245, including one or more post-translational modifications of that sequence. In a particular embodiment, the VH comprises one, two or three CDRs selected from: a. CDR-H1, comprising the amino acid sequence SEQ ID NO: 787, b. CDR-H2, comprising the amino acid sequence SEQ ID NO: 1329, and c. CDR-H3, comprising the amino acid sequence SEQ ID NO: 1871.

[2794] In one aspect, an antibody or antigen-binding fragment thereof is provided, wherein the antibody or antigen-binding fragment thereof comprises a light chain variable domain (VL) having at least 90%, 91%, 92%, 93%, 94%, 95%, 96%, 97%, 98%, 99%, or 100% sequence identity to the amino acid sequence SEQ ID NO: 516. In some embodiments, a VL sequence having at least 90%, 91%, 92%, 93%, 94%, 95%, 96%, 97%, 98%, or 99% identity contains substitutions (e.g., conservative substitutions), insertions, or deletions relative to the reference sequence, but an antibody or antigen-binding fragment thereof comprising that sequence retains the ability to bind to same antigen as the parent (e.g., cancer associated antigen). In some embodiments, a total of 1 to 10 amino acids have been substituted, inserted and/or deleted in the amino acid sequence SEQ ID NO: 516. In some embodiments, the substitutions, insertions, or deletions occur in regions outside the CDRs (e.g., in the FRs). Optionally, the antibody or antigen-binding fragment thereof comprises the VL sequence SEQ ID NO: 516, including one or more post-translational modifications of that sequence. In a particular embodiment, the VL comprises one, two or three CDRs selected from: a. CDR-L1, comprising the amino acid sequence SEQ ID NO: 1058, b. CDR-L2, comprising the amino acid sequence SEQ ID NO: 1600, and c. CDR-L3, comprising the amino acid sequence SEQ ID NO: 2142.

[2795] In one aspect, an antibody or antigen-binding fragment thereof is provided, wherein the antibody or antigen-binding fragment thereof comprises a VH as in any of the embodiments provided above, and a VL as in any of the embodiments provided above. In some embodiments, the antibody or antigen-binding fragment thereof comprises the VH amino acid sequence of SEQ ID NO: 245, and the VL amino acid sequence of SEQ ID NO: 516, optionally including post-translational modifications of those sequences.

### TTES1006

[2796] In one aspect, the present disclosure provides an antibody or antigen-binding fragment thereof comprising at least one or both variable regions selected from: a. VH comprising the amino acid sequence of SEQ ID NO: 246 and b. VL comprising the amino acid sequence of SEQ ID NO: 517.

[2797] In one aspect, the present disclosure provides an antibody or antigen-binding fragment thereof comprising at least one, two, three, four, five, or six CDRs selected from: a. CDR-H1 comprising the amino acid sequence of SEQ ID NO: 788, b. CDR-H2 comprising the amino acid sequence of SEQ ID NO: 1330, c. CDR-H3 comprising the amino acid sequence of SEQ ID NO: 1872, d. CDR-L1 comprising the amino acid sequence of SEQ ID NO: 1059, e. CDR-L2 comprising the amino acid sequence of SEQ ID NO: 1601, and f. CDR-L3 comprising the amino acid sequence of SEQ ID NO: 2143.

[2798] In one aspect, the present disclosure provides an antibody or antigen-binding fragment thereof comprising a CDR-H3 comprising the amino acid sequence of SEQ ID NO: 1872, a CDR-L3 comprising the amino acid sequence of SEQ ID NO: 2143.

[2799] In one aspect, the present disclosure provides an antibody or antigen-binding fragment thereof comprising at least one, at least two, or all three VH CDR sequences selected from: a. CDR-H1 comprising the amino acid sequence of SEQ ID NO: 788, b. CDR-H2 comprising the amino acid sequence of SEQ ID NO: 1330, c. CDR-H3 comprising the amino acid sequence of SEQ ID NO: 1872, and a VL comprising the amino acid sequence of SEQ ID NO: 517.

[2800] In one aspect, the present disclosure provides an antibody or antigen-binding fragment thereof comprising at least one, at least two, or all three VL CDR sequences selected from: a. CDR-L1 comprising the amino acid sequence of SEQ ID NO: 1059, b. CDR-L2 comprising the amino acid sequence of SEQ ID NO: 1601, c. CDR-L3 comprising the amino acid sequence of SEQ ID NO: 2143, and a VH comprising the amino acid sequence of SEQ ID NO: 246.

[2801] In one aspect, an antibody or antigen-binding fragment thereof is provided, wherein the antibody or antigen-binding fragment thereof comprises a heavy chain variable domain (VH) having at least 90%, 91%, 92%, 93%, 94%, 95%, 96%, 97%, 98%, 99%, or 100% sequence identity to the amino acid sequence SEQ ID NO: 246. In some embodiments, a VH sequence having at least 90%, 91%, 92%, 93%, 94%, 95%, 96%, 97%, 98%, or 99% identity contains substitutions (e.g., conservative substitutions), insertions, or deletions relative to the reference sequence, but an antibody or antigen-binding fragment thereof comprising that sequence retains the ability to bind to same antigen as of the parent (e.g., cancer associated antigen). In some embodiments, a total of 1 to 10 amino acids have been substituted, inserted and/or deleted in the amino acid sequence SEQ ID NO: 246. In some embodiments, substitutions, insertions, or deletions occur in regions outside the CDRs (e.g., in the FRs). Optionally, the antibody or antigen-binding fragment thereof comprises the VH sequence SEQ ID NO: 246, including one or more post-translational modifications of that sequence. In a particular embodiment, the VH comprises one, two or three CDRs selected from: a. CDR-H1, comprising the amino acid sequence SEQ ID NO: 788, b. CDR-H2, comprising the amino acid sequence SEQ ID NO: 1330, and c. CDR-H3, comprising the amino acid sequence SEQ ID NO: 1872.

[2802] In one aspect, an antibody or antigen-binding fragment thereof is provided, wherein the antibody or antigen-binding fragment thereof comprises a light chain variable domain (VL) having at least 90%, 91%, 92%, 93%, 94%, 95%, 96%, 97%, 98%, 99%, or 100% sequence identity to the amino acid sequence SEQ ID NO: 517. In some embodiments, a VL sequence having at least 90%, 91%, 92%, 93%, 94%, 95%, 96%, 97%, 98%, or 99% identity contains substitutions (e.g., conservative substitutions), thereof comprising that sequence retains the ability to bind to same antigen as the parent (e.g., cancer associated antigen). In some embodiments, a total of 1 to 10 amino acids have been substituted, inserted and/or deleted in the amino acid sequence SEQ ID NO: 517. In some embodiments, the substitutions, insertions, or deletions occur in regions outside the CDRs (e.g., in the FRs). Optionally, the antibody or antigen-binding fragment thereof comprises the VL sequence SEQ ID NO: 517, including one or more post-translational modifications of that sequence. In a particular embodiment, the VL comprises one, two or three CDRs selected from: a. CDR-L1, comprising the amino acid sequence SEQ ID NO: 1059, b. CDR-L2, comprising the amino acid sequence SEQ ID NO: 1601, and c. CDR-L3, comprising the amino acid sequence SEQ ID NO: 2143.

[2803] In one aspect, an antibody or antigen-binding fragment thereof is provided, wherein the antibody or antigen-binding fragment thereof comprises a VH as in any of the embodiments provided above, and a VL as in any of the embodiments provided above. In some embodiments, the antibody or antigen-binding fragment thereof comprises the VH amino acid sequence of SEQ ID NO: 246, and the VL amino acid sequence of SEQ ID NO: 517, optionally including post-translational modifications of those sequences.

### TTES1007

[2804] In one aspect, the present disclosure provides an antibody or antigen-binding fragment thereof comprising at least one or both variable regions selected from: a. VH comprising the amino acid sequence of SEQ ID NO: 247 and b. VL comprising the amino acid sequence of SEQ ID NO: 518.

[2805] In one aspect, the present disclosure provides an antibody or antigen-binding fragment thereof comprising at least one, two, three, four, five, or six CDRs selected from: a. CDR-H1 comprising the amino acid sequence of SEQ ID NO: 789, b. CDR-H2 comprising the amino acid sequence of SEQ ID NO: 1331, c. CDR-H3 comprising the amino acid sequence of SEQ ID NO: 1873, d. CDR-L1 comprising the amino acid sequence of SEQ ID NO: 1060, e. CDR-L2 comprising the amino acid sequence of SEQ ID NO: 1602, and f. CDR-L3 comprising the amino acid sequence of SEQ ID NO: 2144.

[2806] In one aspect, the present disclosure provides an antibody or antigen-binding fragment thereof comprising a CDR-H3 comprising the amino acid sequence of SEQ ID NO: 1873, and a CDR-L3 comprising the amino acid sequence of SEQ ID NO: 2144.

[2807] In one aspect, the present disclosure provides an antibody or antigen-binding fragment thereof comprising at least one, at least two, or all three VH CDR sequences selected from: a. CDR-H1 comprising the amino acid sequence of SEQ ID NO: 789, b. CDR-H2 comprising the amino acid sequence of SEQ ID NO: 1331, c. CDR-H3 comprising the amino acid sequence of SEQ ID NO: 1873, and a VL comprising the amino acid sequence of SEQ ID NO: 518.

[2808] In one aspect, the present disclosure provides an antibody or antigen-binding fragment thereof comprising at least one, at least two, or all three VL CDR sequences selected from: a. CDR-L1 comprising the amino acid sequence of SEQ ID NO: 1060, b. CDR-L2 comprising the amino acid sequence of SEQ ID NO: 1602, c. CDR-L3 comprising the amino acid sequence of SEQ ID NO: 2144, and a VH comprising the amino acid sequence of SEQ ID NO: 247.

[2809] In one aspect, an antibody or antigen-binding fragment thereof is provided, wherein the antibody or antigen-binding fragment thereof comprises a heavy chain variable domain (VH) having at least 90%, 91%, 92%, 93%, 94%, 95%, 96%, 97%, 98%, 99%, or 100% sequence identity to the amino acid sequence SEQ ID NO: 247. In some embodiments, a VH sequence having at least 90%, 91%, 92%, 93%, 94%, 95%, 96%, 97%, 98%, or 99% identity contains substitutions (e.g., conservative substitutions), insertions, or deletions relative to the reference sequence, but an antibody or antigen-binding fragment thereof comprising that sequence retains the ability to bind to same antigen as of the parent (e.g., cancer associated antigen). In some embodiments, a total of 1 to 10 amino acids have been substituted, inserted and/or deleted in the amino acid sequence SEQ ID NO: 247. In some embodiments, substitutions, insertions, or deletions occur in regions outside the CDRs (e.g., in the FRs). Optionally, the antibody or antigen-binding fragment thereof comprises the VH sequence SEQ ID NO: 247, including one or more post-translational modifications of that sequence. In a particular embodiment, the VH comprises one, two or three CDRs selected from: a. CDR-H1, comprising the amino acid sequence SEQ ID NO: 789, b. CDR-H2, comprising the amino acid sequence SEQ ID NO: 1331, and c. CDR-H3, comprising the amino acid sequence SEQ ID NO: 1873.

[2810] In one aspect, an antibody or antigen-binding fragment thereof is provided, wherein the antibody or antigen-binding fragment thereof comprises a light chain variable domain (VL) having at least 90%, 91%, 92%, 93%, 94%, 95%, 96%, 97%, 98%, 99%, or 100% sequence identity to the amino acid sequence SEQ ID NO: 518. In some embodiments, a VL sequence having at least 90%, 91%, 92%, 93%, 94%, 95%, 96%, 97%, 98%, or 99% identity contains substitutions (e.g., conservative substitutions), insertions, or deletions relative to the reference sequence, but an antibody or antigen-binding fragment thereof comprising that sequence retains the ability to bind to same antigen as the parent (e.g., cancer associated antigen). In some embodiments, a total of 1 to 10 amino acids have been substituted, inserted and/or deleted in the amino acid sequence SEQ ID NO: 518. In some embodiments, the substitutions, insertions, or deletions occur in regions outside the CDRs (e.g., in the FRs). Optionally, the antibody or antigen-binding fragment thereof comprises the VL sequence SEQ ID NO: 518, including one or more post-translational modifications of that sequence. In a particular embodiment, the VL comprises one, two or three CDRs selected from: a. CDR-L1, comprising the amino acid sequence SEQ ID NO: 1060, b. CDR-L2, comprising the amino acid sequence SEQ ID NO: 1602, and c. CDR-L3, comprising the amino acid sequence SEQ ID NO: 2144.

[2811] In one aspect, an antibody or antigen-binding fragment thereof is provided, wherein the antibody or antigen-binding fragment thereof comprises a VH as in any of the embodiments provided above, and a VL as in any of the embodiments provided above. In some embodiments, the antibody or antigen-binding fragment thereof comprises the VH amino acid sequence of SEQ ID NO: 247, and the VL amino acid sequence of SEQ ID NO: 518, optionally including post-translational modifications of those sequences.

### TTES1008

[2812] In one aspect, the present disclosure provides an antibody or antigen-binding fragment thereof comprising at least one or both variable regions selected from: a. VH comprising the amino acid sequence of SEQ ID NO: 248 and b. VL comprising the amino acid sequence of SEQ ID NO: 519.

[2813] In one aspect, the present disclosure provides an antibody or antigen-binding fragment thereof comprising at least one, two, three, four, five, or six CDRs selected from: a. CDR-H1 comprising the amino acid sequence of SEQ ID NO: 790, b. CDR-H2 comprising the amino acid sequence of SEQ ID NO: 1332, c. CDR-H3 comprising the amino acid sequence of SEQ ID NO: 1874, d. CDR-L1 comprising the amino acid sequence of SEQ ID NO: 1061, e. CDR-L2 comprising the amino acid sequence of SEQ ID NO: 1603, and f. CDR-L3 comprising the amino acid sequence of SEQ ID NO: 2145.

[2814] In one aspect, the present disclosure provides an antibody or antigen-binding fragment thereof comprising at least one, two, three, four, five, or six CDRs selected from: a CDR-H3 comprising the amino acid sequence of SEQ ID NO: 1874, and a CDR-L3 comprising the amino acid sequence of SEQ ID NO: 2145.

[2815] In one aspect, the present disclosure provides an antibody or antigen-binding fragment thereof comprising at least one, at least two, or all three VH CDR sequences selected from: a. CDR-H1 comprising the amino acid sequence of SEQ ID NO: 790, b. CDR-H2 comprising the amino acid sequence of SEQ ID NO: 1332, c. CDR-H3 comprising the amino acid sequence of SEQ ID NO: 1874, and a VL comprising the amino acid sequence of SEQ ID NO: 519.

[2816] In one aspect, the present disclosure provides an antibody or antigen-binding fragment thereof comprising at least one, at least two, or all three VL CDR sequences selected from: a. CDR-L1 comprising the amino acid sequence of SEQ ID NO: 1061, b. CDR-L2 comprising the amino acid sequence of SEQ ID NO: 1603, c. CDR-L3 comprising the amino acid sequence of SEQ ID NO: 2145, and a VH comprising the amino acid sequence of SEQ ID NO: 248.

[2817] In one aspect, an antibody or antigen-binding fragment thereof is provided, wherein the antibody or antigen-binding fragment thereof comprises a heavy chain variable domain (VH) having at least 90%, 91%, 92%, 93%, 94%, 95%, 96%, 97%, 98%, 99%, or 100% sequence identity to the amino acid sequence SEQ ID NO: 248. In some embodiments, a VH sequence having at least 90%, 91%, 92%, 93%, 94%, 95%, 96%, 97%, 98%, or 99% identity contains substitutions (e.g., conservative substitutions), insertions, or deletions relative to the reference sequence, but an antibody or antigen-binding fragment thereof comprising that sequence retains the ability to bind to same antigen as of the parent (e.g., cancer associated antigen). In some embodiments, a total of 1 to 10 amino acids have been substituted, inserted and/or deleted in the amino acid sequence SEQ ID NO: 248. In some embodiments, substitutions, insertions, or deletions occur in regions outside the CDRs (e.g., in the FRs). Optionally, the antibody or antigen-binding fragment thereof comprises the VH sequence SEQ ID NO: 248, including one or more post-translational modifications of that sequence. In a particular embodiment, the VH comprises one, two or three CDRs selected from: a. CDR-H1, comprising the amino acid sequence SEQ ID NO: 790, b. CDR-H2, comprising the amino acid sequence SEQ ID NO: 1332, and c. CDR-H3, comprising the amino acid sequence SEQ ID NO: 1874.

[2818] In one aspect, an antibody or antigen-binding fragment thereof is provided, wherein the antibody or antigen-binding fragment thereof comprises a light chain variable domain (VL) having at least 90%, 91%, 92%, 93%, 94%, 95%, 96%, 97%, 98%, 99%, or 100% sequence identity to the amino acid sequence SEQ ID NO: 519. In some embodiments, a VL sequence having at least 90%, 91%, 92%, 93%, 94%, 95%, 96%, 97%, 98%, or 99% identity contains substitutions (e.g., conservative substitutions), insertions, or deletions relative to the reference sequence, but an antibody or antigen-binding fragment thereof comprising that sequence retains the ability to bind to same antigen as the parent (e.g., cancer associated antigen). In some embodiments, a total of 1 to 10 amino acids have been substituted, inserted and/or deleted in the amino acid sequence SEQ ID NO: 519. In some embodiments, the substitutions, insertions, or deletions occur in regions outside the CDRs (e.g., in the FRs). Optionally, the antibody or antigen-binding fragment thereof comprises the VL sequence SEQ ID NO: 519, including one or more post-translational modifications of that sequence. In a particular embodiment, the VL comprises one, two or three CDRs selected from: a. CDR-L1, comprising the amino acid sequence SEQ ID NO: 1061, b. CDR-L2, comprising the amino acid sequence SEQ ID NO: 1603, and c. CDR-L3, comprising the amino acid sequence SEQ ID NO: 2145.

[2819] In one aspect, an antibody or antigen-binding fragment thereof is provided, wherein the antibody or antigen-binding fragment thereof comprises a VH as in any of the embodiments provided above, and a VL as in any of the embodiments provided above. In some embodiments, the antibody or antigen-binding fragment thereof comprises the VH amino acid sequence of SEQ ID NO: 248, and the VL amino acid sequence of SEQ ID NO: 519, optionally including post-translational modifications of those sequences.

### TTES1009

[2820] In one aspect, the present disclosure provides an antibody or antigen-binding fragment thereof comprising at least one or both variable regions selected from: a. VH comprising the amino acid sequence of SEQ ID NO: 249 and b. VL comprising the amino acid sequence of SEQ ID NO: 520.

[2821] In one aspect, the present disclosure provides an antibody or antigen-binding fragment thereof comprising at least one, two, three, four, five, or six CDRs selected from: a. CDR-H1 comprising the amino acid sequence of SEQ ID NO: 791, b. CDR-H2 comprising the amino acid sequence of SEQ ID NO: 1333, c. CDR-H3 comprising the amino acid sequence of SEQ ID NO: 1875, d. CDR-L1 comprising the amino acid sequence of SEQ ID NO: 1062, e. CDR-L2 comprising the amino acid sequence of SEQ ID NO: 1604, and f. CDR-L3 comprising the amino acid sequence of SEQ ID NO: 2146.

[2822] In one aspect, the present disclosure provides an antibody or antigen-binding fragment thereof comprising a CDR-H3 comprising the amino acid sequence of SEQ ID NO: 1875, and a CDR-L3 comprising the amino acid sequence of SEQ ID NO: 2146.

[2823] In one aspect, the present disclosure provides an antibody or antigen-binding fragment thereof comprising at least one, at least two, or all three VH CDR sequences selected from: a. CDR-H1 comprising the amino acid sequence of SEQ ID NO: 791, b. CDR-H2 comprising the amino acid sequence of SEQ ID NO: 1333, c. CDR-H3 comprising the amino acid sequence of SEQ ID NO: 1875, and a VL comprising the amino acid sequence of SEQ ID NO: 520.

[2824] In one aspect, the present disclosure provides an antibody or antigen-binding fragment thereof comprising at least one, at least two, or all three VL CDR sequences selected from: a. CDR-L1 comprising the amino acid sequence of SEQ ID NO: 1062, b. CDR-L2 comprising the amino acid sequence of SEQ ID NO: 1604, c. CDR-L3 comprising the amino acid sequence of SEQ ID NO: 2146, and a VH comprising the amino acid sequence of SEQ ID NO: 249.

[2825] In one aspect, an antibody or antigen-binding fragment thereof is provided, wherein the antibody or antigen-binding fragment thereof comprises a heavy chain variable domain (VH) having at least 90%, 91%, 92%, 93%, 94%, 95%, 96%, 97%, 98%, 99%, or 100% sequence identity to the amino acid sequence SEQ ID NO: 249. In some embodiments, a VH sequence having at least 90%, 91%, 92%, 93%, 94%, 95%, 96%, 97%, 98%, or 99% identity contains substitutions (e.g., conservative substitutions), insertions, or deletions relative to the reference sequence, but an antibody or antigen-binding fragment thereof comprising that sequence retains the ability to bind to same antigen as of the parent (e.g., cancer associated antigen). In some embodiments, a total of 1 to 10 amino acids have been substituted, inserted and/or deleted in the amino acid sequence SEQ ID NO: 249. In some embodiments, substitutions, insertions, or deletions occur in regions outside the CDRs (e.g., in the FRs). Optionally, the antibody or antigen-binding fragment thereof comprises the VH sequence SEQ ID NO: 249, including one or more post-translational modifications of that sequence. In a particular embodiment, the VH comprises one, two or three CDRs selected from: a. CDR-H1, comprising the amino acid sequence SEQ ID NO: 791, b. CDR-H2, comprising the amino acid sequence SEQ ID NO: 1333, and c. CDR-H3, comprising the amino acid sequence SEQ ID NO: 1875.

[2826] In one aspect, an antibody or antigen-binding fragment thereof is provided, wherein the antibody or antigen-binding fragment thereof comprises a light chain variable domain (VL) having at least 90%, 91%, 92%, 93%, 94%, 95%, 96%, 97%, 98%, 99%, or 100% sequence identity to the amino acid sequence SEQ ID NO: 520. In some embodiments, a VL sequence having at least 90%, 91%, 92%, 93%, 94%, 95%, 96%, 97%, 98%, or 99% identity contains substitutions (e.g., conservative substitutions), insertions, or deletions relative to the reference sequence, but an antibody or antigen-binding fragment thereof comprising that sequence retains the ability to bind to same antigen as the parent (e.g., cancer associated antigen). In some embodiments, a total of 1 to 10 amino acids have been substituted, inserted and/or deleted in the amino acid sequence SEQ ID NO: 520. In some embodiments, the substitutions, insertions, or deletions occur in regions outside the CDRs (e.g., in the FRs). Optionally, the antibody or antigen-binding fragment thereof comprises the VL sequence SEQ ID NO: 520, including one or more post-translational modifications of that sequence. In a particular embodiment, the VL comprises one, two or three CDRs selected from: a. CDR-L1, comprising the amino acid sequence SEQ ID NO: 1062, b. CDR-L2, comprising the amino acid sequence SEQ ID NO: 1604, and c. CDR-L3, comprising the amino acid sequence SEQ ID NO: 2146.

[2827] In one aspect, an antibody or antigen-binding fragment thereof is provided, wherein the antibody or antigen-binding fragment thereof comprises a VH as in any of the embodiments provided above, and a VL as in any of the embodiments provided above. In some embodiments, the antibody or antigen-binding fragment thereof comprises the VH amino acid sequence of SEQ ID NO: 249, and the VL amino acid sequence of SEQ ID NO: 520, optionally including post-translational modifications of those sequences.

### TTES1010

[2828] In one aspect, the present disclosure provides an antibody or antigen-binding fragment thereof comprising at least one or both variable regions selected from: a. VH comprising the amino acid sequence of SEQ ID NO: 250 and b. VL comprising the amino acid sequence of SEQ ID NO: 521.

[2829] In one aspect, the present disclosure provides an antibody or antigen-binding fragment thereof comprising at least one, two, three, four, five, or six CDRs selected from: a. CDR-H1 comprising the amino acid sequence of SEQ ID NO: 792, b. CDR-H2 comprising the amino acid sequence of SEQ ID NO: 1334, c. CDR-H3 comprising the amino acid sequence of SEQ ID NO: 1876, d. CDR-L1 comprising the amino acid sequence of SEQ ID NO: 1063, e. CDR-L2 comprising the amino acid sequence of SEQ ID NO: 1605, and f. CDR-L3 comprising the amino acid sequence of SEQ ID NO: 2147.

[2830] In one aspect, the present disclosure provides an antibody or antigen-binding fragment thereof comprising a CDR-H3 comprising the amino acid sequence of SEQ ID NO: 1876, and a CDR-L3 comprising the amino acid sequence of SEQ ID NO: 2147.

[2831] In one aspect, the present disclosure provides an antibody or antigen-binding fragment thereof comprising at least one, at least two, or all three VH CDR sequences selected from: a. CDR-H1 comprising the amino acid sequence of SEQ ID NO: 792, b. CDR-H2 comprising the amino acid sequence of SEQ ID NO: 1334, c. CDR-H3 comprising the amino acid sequence of SEQ ID NO: 1876, and a VL comprising the amino acid sequence of SEQ ID NO: 521.

[2832] In one aspect, the present disclosure provides an antibody or antigen-binding fragment thereof comprising at least one, at least two, or all three VL CDR sequences selected from: a. CDR-L1 comprising the amino acid sequence of SEQ ID NO: 1063, b. CDR-L2 comprising the amino acid sequence of SEQ ID NO: 1605, c. CDR-L3 comprising the amino acid sequence of SEQ ID NO: 2147, and a VH comprising the amino acid sequence of SEQ ID NO: 250.

[2833] In one aspect, an antibody or antigen-binding fragment thereof is provided, wherein the antibody or antigen-binding fragment thereof comprises a heavy chain variable domain (VH) having at least 90%, 91%, 92%, 93%, 94%, 95%, 96%, 97%, 98%, 99%, or 100% sequence identity to the amino acid sequence SEQ ID NO: 250. In some embodiments, a VH sequence having at least 90%, 91%, 92%, 93%, 94%, 95%, 96%, 97%, 98%, or 99% identity contains substitutions (e.g., conservative substitutions), insertions, or deletions relative to the reference sequence, but an antibody or antigen-binding fragment thereof comprising that sequence retains the ability to bind to same antigen as of the parent (e.g., cancer associated antigen). In some embodiments, a total of 1 to 10 amino acids have been substituted, inserted and/or deleted in the amino acid sequence SEQ ID NO: 250. In some embodiments, substitutions, insertions, or deletions occur in regions outside the CDRs (e.g., in the FRs). Optionally, the antibody or antigen-binding fragment thereof comprises the VH sequence SEQ ID NO: 250, including one or more post-translational modifications of that sequence. In a particular embodiment, the VH comprises one, two or three CDRs selected from: a. CDR-H1, comprising the amino acid sequence SEQ ID NO: 792, b. CDR-H2, comprising the amino acid sequence SEQ ID NO: 1334, and c. CDR-H3, comprising the amino acid sequence SEQ ID NO: 1876.

[2834] In one aspect, an antibody or antigen-binding fragment thereof is provided, wherein the antibody or antigen-binding fragment thereof comprises a light chain variable domain (VL) having at least 90%, 91%, 92%, 93%, 94%, 95%, 96%, 97%, 98%, 99%, or 100% sequence identity to the amino acid sequence SEQ ID NO: 521. In some embodiments, a VL sequence having at least 90%, 91%, 92%, 93%, 94%, 95%, 96%, 97%, 98%, or 99% identity contains substitutions (e.g., conservative substitutions), insertions, or deletions relative to the reference sequence, but an antibody or antigen-binding fragment thereof comprising that sequence retains the ability to bind to same antigen as the parent (e.g., cancer associated antigen). In some embodiments, a total of 1 to 10 amino acids have been substituted, inserted and/or deleted in the amino acid sequence SEQ ID NO: 521. In some embodiments, the substitutions, insertions, or deletions occur in regions outside the CDRs (e.g., in the FRs). Optionally, the antibody or antigen-binding fragment thereof comprises the VL sequence SEQ ID NO: 521, including one or more post-translational modifications of that sequence. In a particular embodiment, the VL comprises one, two or three CDRs selected from: a. CDR-L1, comprising the amino acid sequence SEQ ID NO: 1063, b. CDR-L2, comprising the amino acid sequence SEQ ID NO: 1605, and c. CDR-L3, comprising the amino acid sequence SEQ ID NO: 2147.

[2835] In one aspect, an antibody or antigen-binding fragment thereof is provided, wherein the antibody or antigen-binding fragment thereof comprises a VH as in any of the embodiments provided above, and a VL as in any of the embodiments provided above. In some embodiments, the antibody or antigen-binding fragment thereof comprises the VH amino acid sequence of SEQ ID NO: 250, and the VL amino acid sequence of SEQ ID NO: 521, optionally including post-translational modifications of those sequences.

### TTES1011

[2836] In one aspect, the present disclosure provides an antibody or antigen-binding fragment thereof comprising at least one or both variable regions selected from: a. VH comprising the amino acid sequence of SEQ ID NO: 251 and b. VL comprising the amino acid sequence of SEQ ID NO: 522.

[2837] In one aspect, the present disclosure provides an antibody or antigen-binding fragment thereof comprising at least one, two, three, four, five, or six CDRs selected from: a. CDR-H1 comprising the amino acid sequence of SEQ ID NO: 793, b. CDR-H2 comprising the amino acid sequence of SEQ ID NO: 1335, c. CDR-H3 comprising the amino acid sequence of SEQ ID NO: 1877, d. CDR-L1 comprising the amino acid sequence of SEQ ID NO: 1064, e. CDR-L2 comprising the amino acid sequence of SEQ ID NO: 1606, and f. CDR-L3 comprising the amino acid sequence of SEQ ID NO: 2148.

[2838] In one aspect, the present disclosure provides an antibody or antigen-binding fragment thereof comprising a CDR-H3 comprising the amino acid sequence of SEQ ID NO: 1877, and a CDR-L3 comprising the amino acid sequence of SEQ ID NO: 2148.

[2839] In one aspect, the present disclosure provides an antibody or antigen-binding fragment thereof comprising at least one, at least two, or all three VH CDR sequences selected from: a. CDR-H1 comprising the amino acid sequence of SEQ ID NO: 793, b. CDR-H2 comprising the amino acid sequence of SEQ ID NO: 1335, c. CDR-H3 comprising the amino acid sequence of SEQ ID NO: 1877, and a VL comprising the amino acid sequence of SEQ ID NO: 522.

[2840] In one aspect, the present disclosure provides an antibody or antigen-binding fragment thereof comprising at least one, at least two, or all three VL CDR sequences selected from: a. CDR-L1 comprising the amino acid sequence of SEQ ID NO: 1064, b. CDR-L2 comprising the amino acid sequence of SEQ ID NO: 1606, c. CDR-L3 comprising the amino acid sequence of SEQ ID NO: 2148, and a VH comprising the amino acid sequence of SEQ ID NO: 251.

[2841] In one aspect, an antibody or antigen-binding fragment thereof is provided, wherein the antibody or antigen-binding fragment thereof comprises a heavy chain variable domain (VH) having at least 90%, 91%, 92%, 93%, 94%, 95%, 96%, 97%, 98%, 99%, or 100% sequence identity to the amino acid sequence SEQ ID NO: 251. In some embodiments, a VH sequence having at least 90%, 91%, 92%, 93%, 94%, 95%, 96%, 97%, 98%, or 99% identity contains substitutions (e.g., conservative substitutions), insertions, or deletions relative to the reference sequence, but an antibody or antigen-binding fragment thereof comprising that sequence retains the ability to bind to same antigen as of the parent (e.g., cancer associated antigen). In some embodiments, a total of 1 to 10 amino acids have been substituted, inserted and/or deleted in the amino acid sequence SEQ ID NO: 251. In some embodiments, substitutions, insertions, or deletions occur in regions outside the CDRs (e.g., in the FRs). Optionally, the antibody or antigen-binding fragment thereof comprises the VH sequence SEQ ID NO: 251, including one or more post-translational modifications of that sequence. In a particular embodiment, the VH comprises one, two or three CDRs selected from: a. CDR-H1, comprising the amino acid sequence SEQ ID NO: 793, b. CDR-H2, comprising the amino acid sequence SEQ ID NO: 1335, and c. CDR-H3, comprising the amino acid sequence SEQ ID NO: 1877.

[2842] In one aspect, an antibody or antigen-binding fragment thereof is provided, wherein the antibody or antigen-binding fragment thereof comprises a light chain variable domain (VL) having at least 90%, 91%, 92%, 93%, 94%, 95%, 96%, 97%, 98%, 99%, or 100% sequence identity to the amino acid sequence SEQ ID NO: 522. In some embodiments, a VL sequence having at least 90%, 91%, 92%, 93%, 94%, 95%, 96%, 97%, 98%, or 99% identity contains substitutions (e.g., conservative substitutions), insertions, or deletions relative to the reference sequence, but an antibody or antigen-binding fragment thereof comprising that sequence retains the ability to bind to same antigen as the parent (e.g., cancer associated antigen). In some embodiments, a total of 1 to 10 amino acids have been substituted, inserted and/or deleted in the amino acid sequence SEQ ID NO: 522. In some embodiments, the substitutions, insertions, or deletions occur in regions outside the CDRs (e.g., in the FRs). Optionally, the antibody or antigen-binding fragment thereof comprises the VL sequence SEQ ID NO: 522, including one or more post-translational modifications of that sequence. In a particular embodiment, the VL comprises one, two or three CDRs selected from: a. CDR-L1, comprising the amino acid sequence SEQ ID NO: 1064, b. CDR-L2, comprising the amino acid sequence SEQ ID NO: 1606, and c. CDR-L3, comprising the amino acid sequence SEQ ID NO: 2148.

[2843] In one aspect, an antibody or antigen-binding fragment thereof is provided, wherein the antibody or antigen-binding fragment thereof comprises a VH as in any of the embodiments provided above, and a VL as in any of the embodiments provided above. In some embodiments, the antibody or antigen-binding fragment thereof comprises the VH amino acid sequence of SEQ ID NO: 251, and the VL amino acid sequence of SEQ ID NO: 522, optionally including post-translational modifications of those sequences.

### TTES1012

[2844] In one aspect, the present disclosure provides an antibody or antigen-binding fragment thereof comprising at least one or both variable regions selected from: a. VH comprising the amino acid sequence of SEQ ID NO: 252 and b. VL comprising the amino acid sequence of SEQ ID NO: 523.

[2845] In one aspect, the present disclosure provides an antibody or antigen-binding fragment thereof comprising at least one, two, three, four, five, or six CDRs selected from: a. CDR-H1 comprising the amino acid sequence of SEQ ID NO: 794, b. CDR-H2 comprising the amino acid sequence of SEQ ID NO: 1336, c. CDR-H3 comprising the amino acid sequence of SEQ ID NO: 1878, d. CDR-L1 comprising the amino acid sequence of SEQ ID NO: 1065, e. CDR-L2 comprising the amino acid sequence of SEQ ID NO: 1607, and f. CDR-L3 comprising the amino acid sequence of SEQ ID NO: 2149.

[2846] In one aspect, the present disclosure provides an antibody or antigen-binding fragment thereof comprising a CDR-H3 comprising the amino acid sequence of SEQ ID NO: 1878, and a CDR-L3 comprising the amino acid sequence of SEQ ID NO: 2149.

[2847] In one aspect, the present disclosure provides an antibody or antigen-binding fragment thereof comprising at least one, at least two, or all three VH CDR sequences selected from: a. CDR-H1 comprising the amino acid sequence of SEQ ID NO: 794, b. CDR-H2 comprising the amino acid sequence of SEQ ID NO: 1336, c. CDR-H3 comprising the amino acid sequence of SEQ ID NO: 1878, and a VL comprising the amino acid sequence of SEQ ID NO: 523.

[2848] In one aspect, the present disclosure provides an antibody or antigen-binding fragment thereof comprising at least one, at least two, or all three VL CDR sequences selected from: a. CDR-L1 comprising the amino acid sequence of SEQ ID NO: 1065, b. CDR-L2 comprising the amino acid sequence of SEQ ID NO: 1607, c. CDR-L3 comprising the amino acid sequence of SEQ ID NO: 2149, and a VH comprising the amino acid sequence of SEQ ID NO: 252.

[2849] In one aspect, an antibody or antigen-binding fragment thereof is provided, wherein the antibody or antigen-binding fragment thereof comprises a heavy chain variable domain (VH) having at least 90%, 91%, 92%, 93%, 94%, 95%, 96%, 97%, 98%, 99%, or 100% sequence identity to the amino acid sequence SEQ ID NO: 252. In some embodiments, a VH sequence having at least 90%, 91%, 92%, 93%, 94%, 95%, 96%, 97%, 98%, or 99% identity contains substitutions (e.g., conservative substitutions), insertions, or deletions relative to the reference sequence, but an antibody or antigen-binding fragment thereof comprising that sequence retains the ability to bind to same antigen as of the parent (e.g., cancer associated antigen). In some embodiments, a total of 1 to 10 amino acids have been substituted, inserted and/or deleted in the amino acid sequence SEQ ID NO: 252. In some embodiments, substitutions, antigen-binding fragment thereof comprises the VH sequence SEQ ID NO: 252, including one or more post-translational modifications of that sequence. In a particular embodiment, the VH comprises one, two or three CDRs selected from: a. CDR-H1, comprising the amino acid sequence SEQ ID NO: 794, b. CDR-H2, comprising the amino acid sequence SEQ ID NO: 1336, and c. CDR-H3, comprising the amino acid sequence SEQ ID NO: 1878.

[2850] In one aspect, an antibody or antigen-binding fragment thereof is provided, wherein the antibody or antigen-binding fragment thereof comprises a light chain variable domain (VL) having at least 90%, 91%, 92%, 93%, 94%, 95%, 96%, 97%, 98%, 99%, or 100% sequence identity to the amino acid sequence SEQ ID NO: 523. In some embodiments, a VL sequence having at least 90%, 91%, 92%, 93%, 94%, 95%, 96%, 97%, 98%, or 99% identity contains substitutions (e.g., conservative substitutions), insertions, or deletions relative to the reference sequence, but an antibody or antigen-binding fragment thereof comprising that sequence retains the ability to bind to same antigen as the parent (e.g., cancer associated antigen). In some embodiments, a total of 1 to 10 amino acids have been substituted, inserted and/or deleted in the amino acid sequence SEQ ID NO: 523. In some embodiments, the substitutions, insertions, or deletions occur in regions outside the CDRs (e.g., in the FRs). Optionally, the antibody or antigen-binding fragment thereof comprises the VL sequence SEQ ID NO: 523, including one or more post-translational modifications of that sequence. In a particular embodiment, the VL comprises one, two or three CDRs selected from: a. CDR-L1, comprising the amino acid sequence SEQ ID NO: 1065, b. CDR-L2, comprising the amino acid sequence SEQ ID NO: 1607, and c. CDR-L3, comprising the amino acid sequence SEQ ID NO: 2149.

[2851] In one aspect, an antibody or antigen-binding fragment thereof is provided, wherein the antibody or antigen-binding fragment thereof comprises a VH as in any of the embodiments provided above, and a VL as in any of the embodiments provided above. In some embodiments, the antibody or antigen-binding fragment thereof comprises the VH amino acid sequence of SEQ ID NO: 252, and the VL amino acid sequence of SEQ ID NO: 523, optionally including post-translational modifications of those sequences.

### TTHY1001

[2852] In one aspect, the present disclosure provides an antibody or antigen-binding fragment thereof comprising at least one or both variable regions selected from: a. VH comprising the amino acid sequence of SEQ ID NO: 253 and b. VL comprising the amino acid sequence of SEQ ID NO: 524.

[2853] In one aspect, the present disclosure provides an antibody or antigen-binding fragment thereof comprising at least one, two, three, four, five, or six CDRs selected from: a CDR-H1 comprising the amino acid sequence of SEQ ID NO: 795, b. CDR-H2 comprising the amino acid sequence of SEQ ID NO: 1337, c. CDR-H3 comprising the amino acid sequence of SEQ ID NO: 1879, d. CDR-L1 comprising the amino acid sequence of SEQ ID NO: 1066, e. CDR-L2 comprising the amino acid sequence of SEQ ID NO: 1608, and f. CDR-L3 comprising the amino acid sequence of SEQ ID NO: 2150.

[2854] In one aspect, the present disclosure provides an antibody or antigen-binding fragment thereof comprising a CDR-H3 comprising the amino acid sequence of SEQ ID NO: 1879, and a CDR-L3 comprising the amino acid sequence of SEQ ID NO: 2150.

[2855] In one aspect, the present disclosure provides an antibody or antigen-binding fragment thereof comprising at least one, at least two, or all three VH CDR sequences selected from: a. CDR-H1 comprising the amino acid sequence of SEQ ID NO: 795, b. CDR-H2 comprising the amino acid sequence of SEQ ID NO: 1337, c. CDR-H3 comprising the amino acid sequence of SEQ ID NO: 1879, and a VL comprising the amino acid sequence of SEQ ID NO: 524.

[2856] In one aspect, the present disclosure provides an antibody or antigen-binding fragment thereof comprising at least one, at least two, or all three VL CDR sequences selected from: a. CDR-L1 comprising the amino acid sequence of SEQ ID NO: 1066, b. CDR-L2 comprising the amino acid sequence of SEQ ID NO: 1608, c. CDR-L3 comprising the amino acid sequence of SEQ ID NO: 2150, and a VH comprising the amino acid sequence of SEQ ID NO: 253.

[2857] In one aspect, an antibody or antigen-binding fragment thereof is provided, wherein the antibody or antigen-binding fragment thereof comprises a heavy chain variable domain (VH) having at least 90%, 91%, 92%, 93%, 94%, 95%, 96%, 97%, 98%, 99%, or 100% sequence identity to the amino acid sequence SEQ ID NO: 253. In some embodiments, a VH sequence having at least 90%, 91%, 92%, 93%, 94%, 95%, 96%, 97%, 98%, or 99% identity contains substitutions (e.g., conservative substitutions), insertions, or deletions relative to the reference sequence, but an antibody or antigen-binding fragment thereof comprising that sequence retains the ability to bind to same antigen as of the parent (e.g., cancer associated antigen). In some embodiments, a total of 1 to 10 amino acids have been substituted, inserted and/or deleted in the amino acid sequence SEQ ID NO: 253. In some embodiments, substitutions, insertions, or deletions occur in regions outside the CDRs (e.g., in the FRs). Optionally, the antibody or antigen-binding fragment thereof comprises the VH sequence SEQ ID NO: 253, including one or more post-translational modifications of that sequence. In a particular embodiment, the VH comprises one, two or three CDRs selected from: a. CDR-H1, comprising the amino acid sequence SEQ ID NO: 795, b. CDR-H2, comprising the amino acid sequence SEQ ID NO: 1337, and c. CDR-H3, comprising the amino acid sequence SEQ ID NO: 1879.

[2858] In one aspect, an antibody or antigen-binding fragment thereof is provided, wherein the antibody or antigen-binding fragment thereof comprises a light chain variable domain (VL) having at least 90%, 91%, 92%, 93%, 94%, 95%, 96%, 97%, 98%, 99%, or 100% sequence identity to the amino acid sequence SEQ ID NO: 524. In some embodiments, a VL sequence having at least 90%, 91%, 92%, 93%, 94%, 95%, 96%, 97%, 98%, or 99% identity contains substitutions (e.g., conservative substitutions), insertions, or deletions relative to the reference sequence, but an antibody or antigen-binding fragment thereof comprising that sequence retains the ability to bind to same antigen as the parent (e.g., cancer associated antigen). In some embodiments, a total of 1 to 10 amino acids have been substituted, inserted and/or deleted in the amino acid sequence SEQ ID NO: 524. In some embodiments, the substitutions, insertions, or deletions occur in regions outside the CDRs (e.g., in the FRs). Optionally, the antibody or antigen-binding fragment thereof comprises the VL sequence SEQ ID NO: 524, including one or more post-translational modifications of that sequence. In a particular embodiment, the VL comprises one, two or three CDRs selected from: a. CDR-L1, comprising the amino acid sequence SEQ ID NO: 1066, b. CDR-L2, comprising the amino acid sequence SEQ ID NO: 1608, and c. CDR-L3, comprising the amino acid sequence SEQ ID NO: 2150.

[2859] In one aspect, an antibody or antigen-binding fragment thereof is provided, wherein the antibody or antigen-binding fragment thereof comprises a VH as in any of the embodiments provided above, and a VL as in any of the embodiments provided above. In some embodiments, the antibody or antigen-binding fragment thereof comprises the VH amino acid sequence of SEQ ID NO: 253, and the VL amino acid sequence of SEQ ID NO: 524, optionally including post-translational modifications of those sequences.

### TTHY1002

[2860] In one aspect, the present disclosure provides an antibody or antigen-binding fragment thereof comprising at least one or both variable regions selected from: a. VH comprising the amino acid sequence of SEQ ID NO: 254 and b. VL comprising the amino acid sequence of SEQ ID NO: 525.

[2861] In one aspect, the present disclosure provides an antibody or antigen-binding fragment thereof comprising at least one, two, three, four, five, or six CDRs selected from: a. CDR-H1 comprising the amino acid sequence of SEQ ID NO: 796, b. CDR-H2 comprising the amino acid sequence of SEQ ID NO: 1338, c. CDR-H3 comprising the amino acid sequence of SEQ ID NO: 1880, d. CDR-L1 comprising the amino acid sequence of SEQ ID NO: 1067, e. CDR-L2 comprising the amino acid sequence of SEQ ID NO: 1609, and f. CDR-L3 comprising the amino acid sequence of SEQ ID NO: 2151.

[2862] In one aspect, the present disclosure provides an antibody or antigen-binding fragment thereof comprising a CDR-H3 comprising the amino acid sequence of SEQ ID NO: 1880 and a CDR-L3 comprising the amino acid sequence of SEQ ID NO: 2151.

[2863] In one aspect, the present disclosure provides an antibody or antigen-binding fragment thereof comprising at least one, at least two, or all three VH CDR sequences selected from: a. CDR-H1 comprising the amino acid sequence of SEQ ID NO: 796, b. CDR-H2 comprising the amino acid sequence of SEQ ID NO: 1338, c. CDR-H3 comprising the amino acid sequence of SEQ ID NO: 1880, and a VL comprising the amino acid sequence of SEQ ID NO: 525.

[2864] In one aspect, the present disclosure provides an antibody or antigen-binding fragment thereof comprising at least one, at least two, or all three VL CDR sequences selected from: a. CDR-L1 comprising the amino acid sequence of SEQ ID NO: 1067, b. CDR-L2 comprising the amino acid sequence of SEQ ID NO: 1609, c. CDR-L3 comprising the amino acid sequence of SEQ ID NO: 2151, and a VH comprising the amino acid sequence of SEQ ID NO: 254.

[2865] In one aspect, an antibody or antigen-binding fragment thereof is provided, wherein the antibody or antigen-binding fragment thereof comprises a heavy chain variable domain (VH) having at least 90%, 91%, 92%, 93%, 94%, 95%, 96%, 97%, 98%, 99%, or 100% sequence identity to the amino acid sequence SEQ ID NO: 254. In some embodiments, a VH sequence having at least 90%, 91%, 92%, 93%, 94%, 95%, 96%, 97%, 98%, or 99% identity contains substitutions (e.g., conservative substitutions), insertions, or deletions relative to the reference sequence, but an antibody or antigen-binding fragment thereof comprising that sequence retains the ability to bind to same antigen as of the parent (e.g., cancer associated antigen). In some embodiments, a total of 1 to 10 amino acids have been substituted, inserted and/or deleted in the amino acid sequence SEQ ID NO: 254. In some embodiments, substitutions, insertions, or deletions occur in regions outside the CDRs (e.g., in the FRs). Optionally, the antibody or antigen-binding fragment thereof comprises the VH sequence SEQ ID NO: 254, including one or more post-translational modifications of that sequence. In a particular embodiment, the VH comprises one, two or three CDRs selected from: a. CDR-H1, comprising the amino acid sequence SEQ ID NO: 796, b. CDR-H2, comprising the amino acid sequence SEQ ID NO: 1338, and c. CDR-H3, comprising the amino acid sequence SEQ ID NO: 1880.

[2866] In one aspect, an antibody or antigen-binding fragment thereof is provided, wherein the antibody or antigen-binding fragment thereof comprises a light chain variable domain (VL) having at least 90%, 91%, 92%, 93%, 94%, 95%, 96%, 97%, 98%, 99%, or 100% sequence identity to the amino acid sequence SEQ ID NO: 525. In some embodiments, a VL sequence having at least 90%, 91%, 92%, 93%, 94%, 95%, 96%, 97%, 98%, or 99% identity contains substitutions (e.g., conservative substitutions), insertions, or deletions relative to the reference sequence, but an antibody or antigen-binding fragment thereof comprising that sequence retains the ability to bind to same antigen as the parent (e.g., cancer associated antigen). In some embodiments, a total of 1 to 10 amino acids have been substituted, inserted and/or deleted in the amino acid sequence SEQ ID NO: 525. In some embodiments, the substitutions, insertions, or deletions occur in regions outside the CDRs (e.g., in the FRs). Optionally, the antibody or antigen-binding fragment thereof comprises the VL sequence SEQ ID NO: 525, including one or more post-translational modifications of that sequence. In a particular embodiment, the VL comprises one, two or three CDRs selected from: a. CDR-L1, comprising the amino acid sequence SEQ ID NO: 1067, b. CDR-L2, comprising the amino acid sequence SEQ ID NO: 1609, and c. CDR-L3, comprising the amino acid sequence SEQ ID NO: 2151.

[2867] In one aspect, an antibody or antigen-binding fragment thereof is provided, wherein the antibody or antigen-binding fragment thereof comprises a VH as in any of the embodiments provided above, and a VL as in any of the embodiments provided above. In some embodiments, the antibody or antigen-binding fragment thereof comprises the VH amino acid sequence of SEQ ID NO: 254, and the VL amino acid sequence of SEQ ID NO: 525, optionally including post-translational modifications of those sequences.

### TTHY1003

[2868] In one aspect, the present disclosure provides an antibody or antigen-binding fragment thereof comprising at least one or both variable regions selected from: a. VH comprising the amino acid sequence of SEQ ID NO: 255 and b. VL comprising the amino acid sequence of SEQ ID NO: 526.

[2869] In one aspect, the present disclosure provides an antibody or antigen-binding fragment thereof comprising at least one, two, three, four, five, or six CDRs selected from: a. CDR-H1 comprising the amino acid sequence of SEQ ID NO: 797, b. CDR-H2 comprising the amino acid sequence of SEQ ID NO: 1339, c. CDR-H3 comprising the amino acid sequence of SEQ ID NO: 1881, d. CDR-L1 comprising the amino acid sequence of SEQ ID NO: 1068, e. CDR-L2 comprising the amino acid sequence of SEQ ID NO: 1610, and f. CDR-L3 comprising the amino acid sequence of SEQ ID NO: 2152.

[2870] In one aspect, the present disclosure provides an antibody or antigen-binding fragment thereof comprising a CDR-H3 comprising the amino acid sequence of SEQ ID NO: 1881 and a CDR-L3 comprising the amino acid sequence of SEQ ID NO: 2152.

[2871] In one aspect, the present disclosure provides an antibody or antigen-binding fragment thereof comprising at least one, at least two, or all three VH CDR sequences selected from: a. CDR-H1 comprising the amino acid sequence of SEQ ID NO: 797, b. CDR-H2 comprising the amino acid sequence of SEQ ID NO: 1339, c. CDR-H3 comprising the amino acid sequence of SEQ ID NO: 1881, and a VL comprising the amino acid sequence of SEQ ID NO: 526.

[2872] In one aspect, the present disclosure provides an antibody or antigen-binding fragment thereof comprising at least one, at least two, or all three VL CDR sequences selected from: a. CDR-L1 comprising the amino acid sequence of SEQ ID NO: 1068, b. CDR-L2 comprising the amino acid sequence of SEQ ID NO: 1610, c. CDR-L3 comprising the amino acid sequence of SEQ ID NO: 2152, and a VH comprising the amino acid sequence of SEQ ID NO: 255.

[2873] In one aspect, an antibody or antigen-binding fragment thereof is provided, wherein the antibody or antigen-binding fragment thereof comprises a heavy chain variable domain (VH) having at least 90%, 91%, 92%, 93%, 94%, 95%, 96%, 97%, 98%, 99%, or 100% sequence identity to the amino acid sequence SEQ ID NO: 255. In some embodiments, a VH sequence having at least 90%, 91%, 92%, 93%, 94%, 95%, 96%, 97%, 98%, or 99% identity contains substitutions (e.g., conservative substitutions), insertions, or deletions relative to the reference sequence, but an antibody or antigen-binding fragment thereof comprising that sequence retains the ability to bind to same antigen as of the parent (e.g., cancer associated antigen). In some embodiments, a total of 1 to 10 amino acids have been substituted, inserted and/or deleted in the amino acid sequence SEQ ID NO: 255. In some embodiments, substitutions, insertions, or deletions occur in regions outside the CDRs (e.g., in the FRs). Optionally, the antibody or antigen-binding fragment thereof comprises the VH sequence SEQ ID NO: 255, including one or more post-translational modifications of that sequence. In a particular embodiment, the VH comprises one, two or three CDRs selected from: a. CDR-H1, comprising the amino acid sequence SEQ ID NO: 797, b. CDR-H2, comprising the amino acid sequence SEQ ID NO: 1339, and c. CDR-H3, comprising the amino acid sequence SEQ ID NO: 1881.

[2874] In one aspect, an antibody or antigen-binding fragment thereof is provided, wherein the antibody or antigen-binding fragment thereof comprises a light chain variable domain (VL) having at least 90%, 91%, 92%, 93%, 94%, 95%, 96%, 97%, 98%, 99%, or 100% sequence identity to the amino acid sequence SEQ ID NO: 526. In some embodiments, a VL sequence having at least 90%, 91%, 92%, 93%, 94%, 95%, 96%, 97%, 98%, or 99% identity contains substitutions (e.g., conservative substitutions), insertions, or deletions relative to the reference sequence, but an antibody or antigen-binding fragment thereof comprising that sequence retains the ability to bind to same antigen as the parent (e.g., cancer associated antigen). In some embodiments, a total of 1 to 10 amino acids have been substituted, inserted and/or deleted in the amino acid sequence SEQ ID NO: 526. In some embodiments, the substitutions, antigen-binding fragment thereof comprises the VL sequence SEQ ID NO: 526, including one or more post-translational modifications of that sequence. In a particular embodiment, the VL comprises one, two or three CDRs selected from: a. CDR-L1, comprising the amino acid sequence SEQ ID NO: 1068, b. CDR-L2, comprising the amino acid sequence SEQ ID NO: 1610, and c. CDR-L3, comprising the amino acid sequence SEQ ID NO: 2152.

[2875] In one aspect, an antibody or antigen-binding fragment thereof is provided, wherein the antibody or antigen-binding fragment thereof comprises a VH as in any of the embodiments provided above, and a VL as in any of the embodiments provided above. In some embodiments, the antibody or antigen-binding fragment thereof comprises the VH amino acid sequence of SEQ ID NO: 255, and the VL amino acid sequence of SEQ ID NO: 526, optionally including post-translational modifications of those sequences.

### TTHY1004

[2876] In one aspect, the present disclosure provides an antibody or antigen-binding fragment thereof comprising at least one or both variable regions selected from: a. VH comprising the amino acid sequence of SEQ ID NO: 256 and b. VL comprising the amino acid sequence of SEQ ID NO: 527.

[2877] In one aspect, the present disclosure provides an antibody or antigen-binding fragment thereof comprising at least one, two, three, four, five, or six CDRs selected from: a. CDR-H1 comprising the amino acid sequence of SEQ ID NO: 798, b. CDR-H2 comprising the amino acid sequence of SEQ ID NO: 1340, c. CDR-H3 comprising the amino acid sequence of SEQ ID NO: 1882, d. CDR-L1 comprising the amino acid sequence of SEQ ID NO: 1069, e. CDR-L2 comprising the amino acid sequence of SEQ ID NO: 1611, and f. CDR-L3 comprising the amino acid sequence of SEQ ID NO: 2153.

[2878] In one aspect, the present disclosure provides an antibody or antigen-binding fragment thereof comprising a CDR-H3 comprising the amino acid sequence of SEQ ID NO: 1882, and a CDR-L3 comprising the amino acid sequence of SEQ ID NO: 2153.

[2879] In one aspect, the present disclosure provides an antibody or antigen-binding fragment thereof comprising at least one, at least two, or all three VH CDR sequences selected from: a. CDR-H1 comprising the amino acid sequence of SEQ ID NO: 798, b. CDR-H2 comprising the amino acid sequence of SEQ ID NO: 1340, c. CDR-H3 comprising the amino acid sequence of SEQ ID NO: 1882, and a VL comprising the amino acid sequence of SEQ ID NO: 527.

[2880] In one aspect, the present disclosure provides an antibody or antigen-binding fragment thereof comprising at least one, at least two, or all three VL CDR sequences selected from: a. CDR-L1 comprising the amino acid sequence of SEQ ID NO: 1069, b. CDR-L2 comprising the amino acid sequence of SEQ ID NO: 1611, c. CDR-L3 comprising the amino acid sequence of SEQ ID NO: 2153, and a VH comprising the amino acid sequence of SEQ ID NO: 256.

[2881] In one aspect, an antibody or antigen-binding fragment thereof is provided, wherein the antibody or antigen-binding fragment thereof comprises a heavy chain variable domain (VH) having at least 90%, 91%, 92%, 93%, 94%, 95%, 96%, 97%, 98%, 99%, or 100% sequence identity to the amino acid sequence SEQ ID NO: 256. In some embodiments, a VH sequence having at least 90%, 91%, 92%, 93%, 94%, 95%, 96%, 97%, 98%, or 99% identity contains substitutions (e.g., conservative substitutions), thereof comprising that sequence retains the ability to bind to same antigen as of the parent (e.g., cancer associated antigen). In some embodiments, a total of 1 to 10 amino acids have been substituted, inserted and/or deleted in the amino acid sequence SEQ ID NO: 256. In some embodiments, substitutions, insertions, or deletions occur in regions outside the CDRs (e.g., in the FRs). Optionally, the antibody or antigen-binding fragment thereof comprises the VH sequence SEQ ID NO: 256, including one or more post-translational modifications of that sequence. In a particular embodiment, the VH comprises one, two or three CDRs selected from: a. CDR-H1, comprising the amino acid sequence SEQ ID NO: 798, b. CDR-H2, comprising the amino acid sequence SEQ ID NO: 1340, and c. CDR-H3, comprising the amino acid sequence SEQ ID NO: 1882.

[2882] In one aspect, an antibody or antigen-binding fragment thereof is provided, wherein the antibody or antigen-binding fragment thereof comprises a light chain variable domain (VL) having at least 90%, 91%, 92%, 93%, 94%, 95%, 96%, 97%, 98%, 99%, or 100% sequence identity to the amino acid sequence SEQ ID NO: 527. In some embodiments, a VL sequence having at least 90%, 91%, 92%, 93%, 94%, 95%, 96%, 97%, 98%, or 99% identity contains substitutions (e.g., conservative substitutions), insertions, or deletions relative to the reference sequence, but an antibody or antigen-binding fragment thereof comprising that sequence retains the ability to bind to same antigen as the parent (e.g., cancer associated antigen). In some embodiments, a total of 1 to 10 amino acids have been substituted, inserted and/or deleted in the amino acid sequence SEQ ID NO: 527. In some embodiments, the substitutions, insertions, or deletions occur in regions outside the CDRs (e.g., in the FRs). Optionally, the antibody or antigen-binding fragment thereof comprises the VL sequence SEQ ID NO: 527, including one or more post-translational modifications of that sequence. In a particular embodiment, the VL comprises one, two or three CDRs selected from: a. CDR-L1, comprising the amino acid sequence SEQ ID NO: 1069, b. CDR-L2, comprising the amino acid sequence SEQ ID NO: 1611, and c. CDR-L3, comprising the amino acid sequence SEQ ID NO: 2153.

[2883] In one aspect, an antibody or antigen-binding fragment thereof is provided, wherein the antibody or antigen-binding fragment thereof comprises a VH as in any of the embodiments provided above, and a VL as in any of the embodiments provided above. In some embodiments, the antibody or antigen-binding fragment thereof comprises the VH amino acid sequence of SEQ ID NO: 256, and the VL amino acid sequence of SEQ ID NO: 527, optionally including post-translational modifications of those sequences.

### TUCE1001

[2884] In one aspect, the present disclosure provides an antibody or antigen-binding fragment thereof comprising at least one or both variable regions selected from: a. VH comprising the amino acid sequence of SEQ ID NO: 257 and b. VL comprising the amino acid sequence of SEQ ID NO: 528.

[2885] In one aspect, the present disclosure provides an antibody or antigen-binding fragment thereof comprising at least one, two, three, four, five, or six CDRs selected from: a. CDR-H1 comprising the amino acid sequence of SEQ ID NO: 799, b. CDR-H2 comprising the amino acid sequence of SEQ ID NO: 1341, c. CDR-H3 comprising the amino acid sequence of SEQ ID NO: 1883, d. CDR-L1 comprising the amino acid sequence of SEQ ID NO: 1070, e. CDR-L2 comprising the amino acid sequence of SEQ ID NO: 1612, and f. CDR-L3 comprising the amino acid sequence of SEQ ID NO: 2154.

[2886] In one aspect, the present disclosure provides an antibody or antigen-binding fragment thereof comprising at least one, at least two, or all three VH CDR sequences selected from: a. CDR-H1 comprising the amino acid sequence of SEQ ID NO: 799, b. CDR-H2 comprising the amino acid sequence of SEQ ID NO: 1341, b. CDR-H3 comprising the amino acid sequence of SEQ ID NO: 1883, and a VL comprising the amino acid sequence of SEQ ID NO: 528.

[2887] In one aspect, the present disclosure provides an antibody or antigen-binding fragment thereof comprising at least one, at least two, or all three VL CDR sequences selected from: a. CDR-L1 comprising the amino acid sequence of SEQ ID NO: 1070, b. CDR-L2 comprising the amino acid sequence of SEQ ID NO: 1612, c. CDR-L3 comprising the amino acid sequence of SEQ ID NO: 2154, and a VH comprising the amino acid sequence of SEQ ID NO: 257.

[2888] In one aspect, an antibody or antigen-binding fragment thereof is provided, wherein the antibody or antigen-binding fragment thereof comprises a heavy chain variable domain (VH) having at least 90%, 91%, 92%, 93%, 94%, 95%, 96%, 97%, 98%, 99%, or 100% sequence identity to the amino acid sequence SEQ ID NO: 257. In some embodiments, a VH sequence having at least 90%, 91%, 92%, 93%, 94%, 95%, 96%, 97%, 98%, or 99% identity contains substitutions (e.g., conservative substitutions), insertions, or deletions relative to the reference sequence, but an antibody or antigen-binding fragment thereof comprising that sequence retains the ability to bind to same antigen as of the parent (e.g., cancer associated antigen). In some embodiments, a total of 1 to 10 amino acids have been substituted, inserted and/or deleted in the amino acid sequence SEQ ID NO: 257. In some embodiments, substitutions, insertions, or deletions occur in regions outside the CDRs (e.g., in the FRs). Optionally, the antibody or antigen-binding fragment thereof comprises the VH sequence SEQ ID NO: 257, including one or more post-translational modifications of that sequence. In a particular embodiment, the VH comprises one, two or three CDRs selected from: a. CDR-H1, comprising the amino acid sequence SEQ ID NO: 799, b. CDR-H2, comprising the amino acid sequence SEQ ID NO: 1341, and c. CDR-H3, comprising the amino acid sequence SEQ ID NO: 1883.

[2889] In one aspect, an antibody or antigen-binding fragment thereof is provided, wherein the antibody or antigen-binding fragment thereof comprises a light chain variable domain (VL) having at least 90%, 91%, 92%, 93%, 94%, 95%, 96%, 97%, 98%, 99%, or 100% sequence identity to the amino acid sequence SEQ ID NO: 528. In some embodiments, a VL sequence having at least 90%, 91%, 92%, 93%, 94%, 95%, 96%, 97%, 98%, or 99% identity contains substitutions (e.g., conservative substitutions), insertions, or deletions relative to the reference sequence, but an antibody or antigen-binding fragment thereof comprising that sequence retains the ability to bind to same antigen as the parent (e.g., cancer associated antigen). In some embodiments, a total of 1 to 10 amino acids have been substituted, inserted and/or deleted in the amino acid sequence SEQ ID NO: 528. In some embodiments, the substitutions, insertions, or deletions occur in regions outside the CDRs (e.g., in the FRs). Optionally, the antibody or antigen-binding fragment thereof comprises the VL sequence SEQ ID NO: 528, including one or more post-translational modifications of that sequence. In a particular embodiment, the VL comprises one, two or three CDRs selected from: a. CDR-L1, comprising the amino acid sequence SEQ ID NO: 1070, b. CDR-L2, comprising the amino acid sequence SEQ ID NO: 1612, and c. CDR-L3, comprising the amino acid sequence SEQ ID NO: 2154.

[2890] In one aspect, an antibody or antigen-binding fragment thereof is provided, wherein the antibody or antigen-binding fragment thereof comprises a VH as in any of the embodiments provided above, and a VL as in any of the embodiments provided above. In some embodiments, the antibody or antigen-binding fragment thereof comprises the VH amino acid sequence of SEQ ID NO: 257, and the VL amino acid sequence of SEQ ID NO: 528, optionally including post-translational modifications of those sequences.

### TUCE1002

[2891] In one aspect, the present disclosure provides an antibody or antigen-binding fragment thereof comprising at least one or both variable regions selected from: a. VH comprising the amino acid sequence of SEQ ID NO: 258 and b. VL comprising the amino acid sequence of SEQ ID NO: 529.

[2892] In one aspect, the present disclosure provides an antibody or antigen-binding fragment thereof comprising at least one, two, three, four, five, or six CDRs selected from: a. CDR-H1 comprising the amino acid sequence of SEQ ID NO: 800, b. CDR-H2 comprising the amino acid sequence of SEQ ID NO: 1342, c. CDR-H3 comprising the amino acid sequence of SEQ ID NO: 1884, d. CDR-L1 comprising the amino acid sequence of SEQ ID NO: 1071, e. CDR-L2 comprising the amino acid sequence of SEQ ID NO: 1613, and f. CDR-L3 comprising the amino acid sequence of SEQ ID NO: 2155.

[2893] In one aspect, the present disclosure provides an antibody or antigen-binding fragment thereof comprising a CDR-H3 comprising the amino acid sequence of SEQ ID NO: 1884, and a CDR-L3 comprising the amino acid sequence of SEQ ID NO: 2155.

[2894] In one aspect, the present disclosure provides an antibody or antigen-binding fragment thereof comprising at least one, at least two, or all three VH CDR sequences selected from: a. CDR-H1 comprising the amino acid sequence of SEQ ID NO: 800, b. CDR-H2 comprising the amino acid sequence of SEQ ID NO: 1342, c. CDR-H3 comprising the amino acid sequence of SEQ ID NO: 1884, and a VL comprising the amino acid sequence of SEQ ID NO: 529.

[2895] In one aspect, the present disclosure provides an antibody or antigen-binding fragment thereof comprising at least one, at least two, or all three VL CDR sequences selected from: a. CDR-L1 comprising the amino acid sequence of SEQ ID NO: 1071, b. CDR-L2 comprising the amino acid sequence of SEQ ID NO: 1613, c. CDR-L3 comprising the amino acid sequence of SEQ ID NO: 2155, and a VH comprising the amino acid sequence of SEQ ID NO: 258.

[2896] In one aspect, an antibody or antigen-binding fragment thereof is provided, wherein the antibody or antigen-binding fragment thereof comprises a heavy chain variable domain (VH) having at least 90%, 91%, 92%, 93%, 94%, 95%, 96%, 97%, 98%, 99%, or 100% sequence identity to the amino acid sequence SEQ ID NO: 258. In some embodiments, a VH sequence having at least 90%, 91%, 92%, 93%, 94%, 95%, 96%, 97%, 98%, or 99% identity contains substitutions (e.g., conservative substitutions), thereof comprising that sequence retains the ability to bind to same antigen as of the parent (e.g., cancer associated antigen). In some embodiments, a total of 1 to 10 amino acids have been substituted, inserted and/or deleted in the amino acid sequence SEQ ID NO: 258. In some embodiments, substitutions, insertions, or deletions occur in regions outside the CDRs (e.g., in the FRs). Optionally, the antibody or antigen-binding fragment thereof comprises the VH sequence SEQ ID NO: 258, including one or more post-translational modifications of that sequence. In a particular embodiment, the VH comprises one, two or three CDRs selected from: a. CDR-H1, comprising the amino acid sequence SEQ ID NO: 800, b. CDR-H2, comprising the amino acid sequence SEQ ID NO: 1342, and c. CDR-H3, comprising the amino acid sequence SEQ ID NO: 1884.

[2897] In one aspect, an antibody or antigen-binding fragment thereof is provided, wherein the antibody or antigen-binding fragment thereof comprises a light chain variable domain (VL) having at least 90%, 91%, 92%, 93%, 94%, 95%, 96%, 97%, 98%, 99%, or 100% sequence identity to the amino acid sequence SEQ ID NO: 529. In some embodiments, a VL sequence having at least 90%, 91%, 92%, 93%, 94%, 95%, 96%, 97%, 98%, or 99% identity contains substitutions (e.g., conservative substitutions), insertions, or deletions relative to the reference sequence, but an antibody or antigen-binding fragment thereof comprising that sequence retains the ability to bind to same antigen as the parent (e.g., cancer associated antigen). In some embodiments, a total of 1 to 10 amino acids have been substituted, inserted and/or deleted in the amino acid sequence SEQ ID NO: 529. In some embodiments, the substitutions, insertions, or deletions occur in regions outside the CDRs (e.g., in the FRs). Optionally, the antibody or antigen-binding fragment thereof comprises the VL sequence SEQ ID NO: 529, including one or more post-translational modifications of that sequence. In a particular embodiment, the VL comprises one, two or three CDRs selected from: a. CDR-L1, comprising the amino acid sequence SEQ ID NO: 1071, b. CDR-L2, comprising the amino acid sequence SEQ ID NO: 1613, and c. CDR-L3, comprising the amino acid sequence SEQ ID NO: 2155.

[2898] In one aspect, an antibody or antigen-binding fragment thereof is provided, wherein the antibody or antigen-binding fragment thereof comprises a VH as in any of the embodiments provided above, and a VL as in any of the embodiments provided above. In some embodiments, the antibody or antigen-binding fragment thereof comprises the VH amino acid sequence of SEQ ID NO: 258, and the VL amino acid sequence of SEQ ID NO: 529, optionally including post-translational modifications of those sequences.

### TUCE1003

[2899] In one aspect, the present disclosure provides an antibody or antigen-binding fragment thereof comprising at least one or both variable regions selected from: a. VH comprising the amino acid sequence of SEQ ID NO: 259 and b. VL comprising the amino acid sequence of SEQ ID NO: 530.

[2900] In one aspect, the present disclosure provides an antibody or antigen-binding fragment thereof comprising at least one, two, three, four, five, or six CDRs selected from: a. CDR-H1 comprising the amino acid sequence of SEQ ID NO: 801, b. CDR-H2 comprising the amino acid sequence of SEQ ID NO: 1343, c. CDR-H3 comprising the amino acid sequence of SEQ ID NO: 1885, d. CDR-L1 comprising the amino acid sequence of SEQ ID NO: 1072, e. CDR-L2 comprising the amino acid sequence of SEQ ID NO: 1614, and f. CDR-L3 comprising the amino acid sequence of SEQ ID NO: 2156.

[2901] In one aspect, the present disclosure provides an antibody or antigen-binding fragment thereof comprising a CDR-H3 comprising the amino acid sequence of SEQ ID NO: 1885, and a CDR-L3 comprising the amino acid sequence of SEQ ID NO: 2156.

[2902] In one aspect, the present disclosure provides an antibody or antigen-binding fragment thereof comprising at least one, at least two, or all three VH CDR sequences selected from: a. CDR-H1 comprising the amino acid sequence of SEQ ID NO: 801, b. CDR-H2 comprising the amino acid sequence of SEQ ID NO: 1343, c. CDR-H3 comprising the amino acid sequence of SEQ ID NO: 1885, and a VL comprising the amino acid sequence of SEQ ID NO: 530.

[2903] In one aspect, the present disclosure provides an antibody or antigen-binding fragment thereof comprising at least one, at least two, or all three VL CDR sequences selected from: a. CDR-L1 comprising the amino acid sequence of SEQ ID NO: 1072, b. CDR-L2 comprising the amino acid sequence of SEQ ID NO: 1614, c. CDR-L3 comprising the amino acid sequence of SEQ ID NO: 2156, and a VH comprising the amino acid sequence of SEQ ID NO: 259.

[2904] In one aspect, an antibody or antigen-binding fragment thereof is provided, wherein the antibody or antigen-binding fragment thereof comprises a heavy chain variable domain (VH) having at least 90%, 91%, 92%, 93%, 94%, 95%, 96%, 97%, 98%, 99%, or 100% sequence identity to the amino acid sequence SEQ ID NO: 259. In some embodiments, a VH sequence having at least 90%, 91%, 92%, 93%, 94%, 95%, 96%, 97%, 98%, or 99% identity contains substitutions (e.g., conservative substitutions), insertions, or deletions relative to the reference sequence, but an antibody or antigen-binding fragment thereof comprising that sequence retains the ability to bind to same antigen as of the parent (e.g., cancer associated antigen). In some embodiments, a total of 1 to 10 amino acids have been substituted, inserted and/or deleted in the amino acid sequence SEQ ID NO: 259. In some embodiments, substitutions, insertions, or deletions occur in regions outside the CDRs (e.g., in the FRs). Optionally, the antibody or antigen-binding fragment thereof comprises the VH sequence SEQ ID NO: 259, including one or more post-translational modifications of that sequence. In a particular embodiment, the VH comprises one, two or three CDRs selected from: a. CDR-H1, comprising the amino acid sequence SEQ ID NO: 801, b. CDR-H2, comprising the amino acid sequence SEQ ID NO: 1343, and c. CDR-H3, comprising the amino acid sequence SEQ ID NO: 1885.

[2905] In one aspect, an antibody or antigen-binding fragment thereof is provided, wherein the antibody or antigen-binding fragment thereof comprises a light chain variable domain (VL) having at least 90%, 91%, 92%, 93%, 94%, 95%, 96%, 97%, 98%, 99%, or 100% sequence identity to the amino acid sequence SEQ ID NO: 530. In some embodiments, a VL sequence having at least 90%, 91%, 92%, 93%, 94%, 95%, 96%, 97%, 98%, or 99% identity contains substitutions (e.g., conservative substitutions), insertions, or deletions relative to the reference sequence, but an antibody or antigen-binding fragment thereof comprising that sequence retains the ability to bind to same antigen as the parent (e.g., cancer associated antigen). In some embodiments, a total of 1 to 10 amino acids have been substituted, inserted and/or deleted in the amino acid sequence SEQ ID NO: 530. In some embodiments, the substitutions, insertions, or deletions occur in regions outside the CDRs (e.g., in the FRs). Optionally, the antibody or antigen-binding fragment thereof comprises the VL sequence SEQ ID NO: 530, including one or more post-translational modifications of that sequence. In a particular embodiment, the VL comprises one, two or three CDRs selected from: a. CDR-L1, comprising the amino acid sequence SEQ ID NO: 1072, b. CDR-L2, comprising the amino acid sequence SEQ ID NO: 1614, and c. CDR-L3, comprising the amino acid sequence SEQ ID NO: 2156.

[2906] In one aspect, an antibody or antigen-binding fragment thereof is provided, wherein the antibody or antigen-binding fragment thereof comprises a VH as in any of the embodiments provided above, and a VL as in any of the embodiments provided above. In some embodiments, the antibody or antigen-binding fragment thereof comprises the VH amino acid sequence of SEQ ID NO: 259, and the VL amino acid sequence of SEQ ID NO: 530, optionally including post-translational modifications of those sequences.

### TUCE1004

[2907] In one aspect, the present disclosure provides an antibody or antigen-binding fragment thereof comprising at least one or both variable regions selected from: a. VH comprising the amino acid sequence of SEQ ID NO: 260 and b. VL comprising the amino acid sequence of SEQ ID NO: 531.

[2908] In one aspect, the present disclosure provides an antibody or antigen-binding fragment thereof comprising at least one, two, three, four, five, or six CDRs selected from: a. CDR-H1 comprising the amino acid sequence of SEQ ID NO: 802, b. CDR-H2 comprising the amino acid sequence of SEQ ID NO: 1344, c. CDR-H3 comprising the amino acid sequence of SEQ ID NO: 1886, d. CDR-L1 comprising the amino acid sequence of SEQ ID NO: 1073, e. CDR-L2 comprising the amino acid sequence of SEQ ID NO: 1615, and f. CDR-L3 comprising the amino acid sequence of SEQ ID NO: 2157.

[2909] In one aspect, the present disclosure provides an antibody or antigen-binding fragment thereof comprising a CDR-H3 comprising the amino acid sequence of SEQ ID NO: 1886, and a CDR-L3 comprising the amino acid sequence of SEQ ID NO: 2157.

[2910] In one aspect, the present disclosure provides an antibody or antigen-binding fragment thereof comprising at least one, at least two, or all three VH CDR sequences selected from: a. CDR-H1 comprising the amino acid sequence of SEQ ID NO: 802, b. CDR-H2 comprising the amino acid sequence of SEQ ID NO: 1344, c. CDR-H3 comprising the amino acid sequence of SEQ ID NO: 1886, and a VL comprising the amino acid sequence of SEQ ID NO: 531.

[2911] In one aspect, the present disclosure provides an antibody or antigen-binding fragment thereof comprising at least one, at least two, or all three VL CDR sequences selected from: a. CDR-L1 comprising the amino acid sequence of SEQ ID NO: 1073, b. CDR-L2 comprising the amino acid sequence of SEQ ID NO: 1615, c. CDR-L3 comprising the amino acid sequence of SEQ ID NO: 2157, and a VH comprising the amino acid sequence of SEQ ID NO: 260.

[2912] In one aspect, an antibody or antigen-binding fragment thereof is provided, wherein the antibody or antigen-binding fragment thereof comprises a heavy chain variable domain (VH) having at least 90%, 91%, 92%, 93%, 94%, 95%, 96%, 97%, 98%, 99%, or 100% sequence identity to the amino acid sequence SEQ ID NO: 260. In some embodiments, a VH sequence having at least 90%, 91%, 92%, 93%, 94%, 95%, 96%, 97%, 98%, or 99% identity contains substitutions (e.g., conservative substitutions), insertions, or deletions relative to the reference sequence, but an antibody or antigen-binding fragment thereof comprising that sequence retains the ability to bind to same antigen as of the parent (e.g., cancer associated antigen). In some embodiments, a total of 1 to 10 amino acids have been substituted, inserted and/or deleted in the amino acid sequence SEQ ID NO: 260. In some embodiments, substitutions, insertions, or deletions occur in regions outside the CDRs (e.g., in the FRs). Optionally, the antibody or antigen-binding fragment thereof comprises the VH sequence SEQ ID NO: 260, including one or more post-translational modifications of that sequence. In a particular embodiment, the VH comprises one, two or three CDRs selected from: a. CDR-H1, comprising the amino acid sequence SEQ ID NO: 802, b. CDR-H2, comprising the amino acid sequence SEQ ID NO: 1344, and c. CDR-H3, comprising the amino acid sequence SEQ ID NO: 1886.

[2913] In one aspect, an antibody or antigen-binding fragment thereof is provided, wherein the antibody or antigen-binding fragment thereof comprises a light chain variable domain (VL) having at least 90%, 91%, 92%, 93%, 94%, 95%, 96%, 97%, 98%, 99%, or 100% sequence identity to the amino acid sequence SEQ ID NO: 531. In some embodiments, a VL sequence having at least 90%, 91%, 92%, 93%, 94%, 95%, 96%, 97%, 98%, or 99% identity contains substitutions (e.g., conservative substitutions), insertions, or deletions relative to the reference sequence, but an antibody or antigen-binding fragment thereof comprising that sequence retains the ability to bind to same antigen as the parent (e.g., cancer associated antigen). In some embodiments, a total of 1 to 10 amino acids have been substituted, inserted and/or deleted in the amino acid sequence SEQ ID NO: 531. In some embodiments, the substitutions, insertions, or deletions occur in regions outside the CDRs (e.g., in the FRs). Optionally, the antibody or antigen-binding fragment thereof comprises the VL sequence SEQ ID NO: 531, including one or more post-translational modifications of that sequence. In a particular embodiment, the VL comprises one, two or three CDRs selected from: a. CDR-L1, comprising the amino acid sequence SEQ ID NO: 1073, b. CDR-L2, comprising the amino acid sequence SEQ ID NO: 1615, and c. CDR-L3, comprising the amino acid sequence SEQ ID NO: 2157.

[2914] In one aspect, an antibody or antigen-binding fragment thereof is provided, wherein the antibody or antigen-binding fragment thereof comprises a VH as in any of the embodiments provided above, and a VL as in any of the embodiments provided above. In some embodiments, the antibody or antigen-binding fragment thereof comprises the VH amino acid sequence of SEQ ID NO: 260, and the VL amino acid sequence of SEQ ID NO: 531, optionally including post-translational modifications of those sequences.

### TUCE1005

[2915] In one aspect, the present disclosure provides an antibody or antigen-binding fragment thereof comprising at least one or both variable regions selected from: a. VH comprising the amino acid sequence of SEQ ID NO: 261 and b. VL comprising the amino acid sequence of SEQ ID NO: 532.

[2916] In one aspect, the present disclosure provides an antibody or antigen-binding fragment thereof comprising at least one, two, three, four, five, or six CDRs selected from: a. CDR-H1 comprising the amino acid sequence of SEQ ID NO: 803, b. CDR-H2 comprising the amino acid sequence of SEQ ID NO: 1345, c. CDR-H3 comprising the amino acid sequence of SEQ ID NO: 1887, d. CDR-L1 comprising the amino acid sequence of SEQ ID NO: 1074, e. CDR-L2 comprising the amino acid sequence of SEQ ID NO: 1616, and f. CDR-L3 comprising the amino acid sequence of SEQ ID NO: 2158.

[2917] In one aspect, the present disclosure provides an antibody or antigen-binding fragment thereof comprising a CDR-H3 comprising the amino acid sequence of SEQ ID NO: 1887, and a CDR-L3 comprising the amino acid sequence of SEQ ID NO: 2158.

[2918] In one aspect, the present disclosure provides an antibody or antigen-binding fragment thereof comprising at least one, at least two, or all three VH CDR sequences selected from: a. CDR-H1 comprising the amino acid sequence of SEQ ID NO: 803, b. CDR-H2 comprising the amino acid sequence of SEQ ID NO: 1345, c. CDR-H3 comprising the amino acid sequence of SEQ ID NO: 1887, and a VL comprising the amino acid sequence of SEQ ID NO: 532.

[2919] In one aspect, the present disclosure provides an antibody or antigen-binding fragment thereof comprising at least one, at least two, or all three VL CDR sequences selected from: a. CDR-L1 comprising the amino acid sequence of SEQ ID NO: 1074, b. CDR-L2 comprising the amino acid sequence of SEQ ID NO: 1616, c. CDR-L3 comprising the amino acid sequence of SEQ ID NO: 2158, and a VH comprising the amino acid sequence of SEQ ID NO: 261.

[2920] In one aspect, an antibody or antigen-binding fragment thereof is provided, wherein the antibody or antigen-binding fragment thereof comprises a heavy chain variable domain (VH) having at least 90%, 91%, 92%, 93%, 94%, 95%, 96%, 97%, 98%, 99%, or 100% sequence identity to the amino acid sequence SEQ ID NO: 261. In some embodiments, a VH sequence having at least 90%, 91%, 92%, 93%, 94%, 95%, 96%, 97%, 98%, or 99% identity contains substitutions (e.g., conservative substitutions), insertions, or deletions relative to the reference sequence, but an antibody or antigen-binding fragment thereof comprising that sequence retains the ability to bind to same antigen as of the parent (e.g., cancer associated antigen). In some embodiments, a total of 1 to 10 amino acids have been substituted, inserted and/or deleted in the amino acid sequence SEQ ID NO: 261. In some embodiments, substitutions, insertions, or deletions occur in regions outside the CDRs (e.g., in the FRs). Optionally, the antibody or antigen-binding fragment thereof comprises the VH sequence SEQ ID NO: 261, including one or more post-translational modifications of that sequence. In a particular embodiment, the VH comprises one, two or three CDRs selected from: a. CDR-H1, comprising the amino acid sequence SEQ ID NO: 803, b. CDR-H2, comprising the amino acid sequence SEQ ID NO: 1345, and c. CDR-H3, comprising the amino acid sequence SEQ ID NO: 1887.

[2921] In one aspect, an antibody or antigen-binding fragment thereof is provided, wherein the antibody or antigen-binding fragment thereof comprises a light chain variable domain (VL) having at least 90%, 91%, 92%, 93%, 94%, 95%, 96%, 97%, 98%, 99%, or 100% sequence identity to the amino acid sequence SEQ ID NO: 532. In some embodiments, a VL sequence having at least 90%, 91%, 92%, 93%, 94%, 95%, 96%, 97%, 98%, or 99% identity contains substitutions (e.g., conservative substitutions), thereof comprising that sequence retains the ability to bind to same antigen as the parent (e.g., cancer associated antigen). In some embodiments, a total of 1 to 10 amino acids have been substituted, inserted and/or deleted in the amino acid sequence SEQ ID NO: 532. In some embodiments, the substitutions, insertions, or deletions occur in regions outside the CDRs (e.g., in the FRs). Optionally, the antibody or antigen-binding fragment thereof comprises the VL sequence SEQ ID NO: 532, including one or more post-translational modifications of that sequence. In a particular embodiment, the VL comprises one, two or three CDRs selected from: a. CDR-L1, comprising the amino acid sequence SEQ ID NO: 1074, b. CDR-L2, comprising the amino acid sequence SEQ ID NO: 1616, and c. CDR-L3, comprising the amino acid sequence SEQ ID NO: 2158.

[2922] In one aspect, an antibody or antigen-binding fragment thereof is provided, wherein the antibody or antigen-binding fragment thereof comprises a VH as in any of the embodiments provided above, and a VL as in any of the embodiments provided above. In some embodiments, the antibody or antigen-binding fragment thereof comprises the VH amino acid sequence of SEQ ID NO: 261, and the VL amino acid sequence of SEQ ID NO: 532, optionally including post-translational modifications of those sequences.

### TUCE1006

[2923] In one aspect, the present disclosure provides an antibody or antigen-binding fragment thereof comprising at least one or both variable regions selected from: a. VH comprising the amino acid sequence of SEQ ID NO: 262 and b. VL comprising the amino acid sequence of SEQ ID NO: 533.

[2924] In one aspect, the present disclosure provides an antibody or antigen-binding fragment thereof comprising at least one, two, three, four, five, or six CDRs selected from: a. CDR-H1 comprising the amino acid sequence of SEQ ID NO: 804, b. CDR-H2 comprising the amino acid sequence of SEQ ID NO: 1346, c. CDR-H3 comprising the amino acid sequence of SEQ ID NO: 1888, d. CDR-L1 comprising the amino acid sequence of SEQ ID NO: 1075, e. CDR-L2 comprising the amino acid sequence of SEQ ID NO: 1617, and f. CDR-L3 comprising the amino acid sequence of SEQ ID NO: 2159.

[2925] In one aspect, the present disclosure provides an antibody or antigen-binding fragment thereof comprising a CDR-H3 comprising the amino acid sequence of SEQ ID NO: 1888, and a CDR-L3 comprising the amino acid sequence of SEQ ID NO: 2159.

[2926] In one aspect, the present disclosure provides an antibody or antigen-binding fragment thereof comprising at least one, at least two, or all three VH CDR sequences selected from: a. CDR-H1 comprising the amino acid sequence of SEQ ID NO: 804, b. CDR-H2 comprising the amino acid sequence of SEQ ID NO: 1346, c. CDR-H3 comprising the amino acid sequence of SEQ ID NO: 1888, and a VL comprising the amino acid sequence of SEQ ID NO: 533.

[2927] In one aspect, the present disclosure provides an antibody or antigen-binding fragment thereof comprising at least one, at least two, or all three VL CDR sequences selected from: a. CDR-L1 comprising the amino acid sequence of SEQ ID NO: 1075, b. CDR-L2 comprising the amino acid sequence of SEQ ID NO: 1617, c. CDR-L3 comprising the amino acid sequence of SEQ ID NO: 2159, and a VH comprising the amino acid sequence of SEQ ID NO: 262.

[2928] In one aspect, an antibody or antigen-binding fragment thereof is provided, wherein the antibody or antigen-binding fragment thereof comprises a heavy chain variable domain (VH) having at least 90%, 91%, 92%, 93%, 94%, 95%, 96%, 97%, 98%, 99%, or 100% sequence identity to the amino acid sequence SEQ ID NO: 262. In some embodiments, a VH sequence having at least 90%, 91%, 92%, 93%, 94%, 95%, 96%, 97%, 98%, or 99% identity contains substitutions (e.g., conservative substitutions), insertions, or deletions relative to the reference sequence, but an antibody or antigen-binding fragment thereof comprising that sequence retains the ability to bind to same antigen as of the parent (e.g., cancer associated antigen). In some embodiments, a total of 1 to 10 amino acids have been substituted, inserted and/or deleted in the amino acid sequence SEQ ID NO: 262. In some embodiments, substitutions, insertions, or deletions occur in regions outside the CDRs (e.g., in the FRs). Optionally, the antibody or antigen-binding fragment thereof comprises the VH sequence SEQ ID NO: 262, including one or more post-translational modifications of that sequence. In a particular embodiment, the VH comprises one, two or three CDRs selected from: a. CDR-H1, comprising the amino acid sequence SEQ ID NO: 804, b. CDR-H2, comprising the amino acid sequence SEQ ID NO: 1346, and c. CDR-H3, comprising the amino acid sequence SEQ ID NO: 1888.

[2929] In one aspect, an antibody or antigen-binding fragment thereof is provided, wherein the antibody or antigen-binding fragment thereof comprises a light chain variable domain (VL) having at least 90%, 91%, 92%, 93%, 94%, 95%, 96%, 97%, 98%, 99%, or 100% sequence identity to the amino acid sequence SEQ ID NO: 533. In some embodiments, a VL sequence having at least 90%, 91%, 92%, 93%, 94%, 95%, 96%, 97%, 98%, or 99% identity contains substitutions (e.g., conservative substitutions), insertions, or deletions relative to the reference sequence, but an antibody or antigen-binding fragment thereof comprising that sequence retains the ability to bind to same antigen as the parent (e.g., cancer associated antigen). In some embodiments, a total of 1 to 10 amino acids have been substituted, inserted and/or deleted in the amino acid sequence SEQ ID NO: 533. In some embodiments, the substitutions, insertions, or deletions occur in regions outside the CDRs (e.g., in the FRs). Optionally, the antibody or antigen-binding fragment thereof comprises the VL sequence SEQ ID NO: 533, including one or more post-translational modifications of that sequence. In a particular embodiment, the VL comprises one, two or three CDRs selected from: a. CDR-L1, comprising the amino acid sequence SEQ ID NO: 1075, b. CDR-L2, comprising the amino acid sequence SEQ ID NO: 1617, and c. CDR-L3, comprising the amino acid sequence SEQ ID NO: 2159.

[2930] In one aspect, an antibody or antigen-binding fragment thereof is provided, wherein the antibody or antigen-binding fragment thereof comprises a VH as in any of the embodiments provided above, and a VL as in any of the embodiments provided above. In some embodiments, the antibody or antigen-binding fragment thereof comprises the VH amino acid sequence of SEQ ID NO: 262, and the VL amino acid sequence of SEQ ID NO: 533, optionally including post-translational modifications of those sequences.

### TUCE1007

[2931] In one aspect, the present disclosure provides an antibody or antigen-binding fragment thereof comprising at least one or both variable regions selected from: a. VH comprising the amino acid sequence of SEQ ID NO: 263 and b. VL comprising the amino acid sequence of SEQ ID NO: 534.

[2932] In one aspect, the present disclosure provides an antibody or antigen-binding fragment thereof comprising at least one, two, three, four, five, or six CDRs selected from: a. CDR-H1 comprising the amino acid sequence of SEQ ID NO: 805, b. CDR-H2 comprising the amino acid sequence of SEQ ID NO: 1347, c. CDR-H3 comprising the amino acid sequence of SEQ ID NO: 1889, d. CDR-L1 comprising the amino acid sequence of SEQ ID NO: 1076, e. CDR-L2 comprising the amino acid sequence of SEQ ID NO: 1618, f. CDR-L3 comprising the amino acid sequence of SEQ ID NO: 2160.

[2933] In one aspect, the present disclosure provides an antibody or antigen-binding fragment thereof comprising a CDR-H3 comprising the amino acid sequence of SEQ ID NO: 1889, and a CDR-L3 comprising the amino acid sequence of SEQ ID NO: 2160.

[2934] In one aspect, the present disclosure provides an antibody or antigen-binding fragment thereof comprising at least one, at least two, or all three VH CDR sequences selected from: a. CDR-H1 comprising the amino acid sequence of SEQ ID NO: 805, b. CDR-H2 comprising the amino acid sequence of SEQ ID NO: 1347, c. CDR-H3 comprising the amino acid sequence of SEQ ID NO: 1889, and a VL comprising the amino acid sequence of SEQ ID NO: 534.

[2935] In one aspect, the present disclosure provides an antibody or antigen-binding fragment thereof comprising at least one, at least two, or all three VL CDR sequences selected from: a. CDR-L1 comprising the amino acid sequence of SEQ ID NO: 1076, b. CDR-L2 comprising the amino acid sequence of SEQ ID NO: 1618, c. CDR-L3 comprising the amino acid sequence of SEQ ID NO: 2160, and a VH comprising the amino acid sequence of SEQ ID NO: 263.

[2936] In one aspect, an antibody or antigen-binding fragment thereof is provided, wherein the antibody or antigen-binding fragment thereof comprises a heavy chain variable domain (VH) having at least 90%, 91%, 92%, 93%, 94%, 95%, 96%, 97%, 98%, 99%, or 100% sequence identity to the amino acid sequence SEQ ID NO: 263. In some embodiments, a VH sequence having at least 90%, 91%, 92%, 93%, 94%, 95%, 96%, 97%, 98%, or 99% identity contains substitutions (e.g., conservative substitutions), insertions, or deletions relative to the reference sequence, but an antibody or antigen-binding fragment thereof comprising that sequence retains the ability to bind to same antigen as of the parent (e.g., cancer associated antigen). In some embodiments, a total of 1 to 10 amino acids have been substituted, inserted and/or deleted in the amino acid sequence SEQ ID NO: 263. In some embodiments, substitutions, insertions, or deletions occur in regions outside the CDRs (e.g., in the FRs). Optionally, the antibody or antigen-binding fragment thereof comprises the VH sequence SEQ ID NO: 263, including one or more post-translational modifications of that sequence. In a particular embodiment, the VH comprises one, two or three CDRs selected from: a. CDR-H1, comprising the amino acid sequence SEQ ID NO: 805, b. CDR-H2, comprising the amino acid sequence SEQ ID NO: 1347, and c. CDR-H3, comprising the amino acid sequence SEQ ID NO: 1889.

[2937] In one aspect, an antibody or antigen-binding fragment thereof is provided, wherein the antibody or antigen-binding fragment thereof comprises a light chain variable domain (VL) having at least 90%, 91%, 92%, 93%, 94%, 95%, 96%, 97%, 98%, 99%, or 100% sequence identity to the amino acid sequence SEQ ID NO: 534. In some embodiments, a VL sequence having at least 90%, 91%, 92%, 93%, 94%, 95%, 96%, 97%, 98%, or 99% identity contains substitutions (e.g., conservative substitutions), insertions, or deletions relative to the reference sequence, but an antibody or antigen-binding fragment thereof comprising that sequence retains the ability to bind to same antigen as the parent (e.g., cancer associated antigen). In some embodiments, a total of 1 to 10 amino acids have been substituted, inserted and/or deleted in the amino acid sequence SEQ ID NO: 534. In some embodiments, the substitutions, insertions, or deletions occur in regions outside the CDRs (e.g., in the FRs). Optionally, the antibody or antigen-binding fragment thereof comprises the VL sequence SEQ ID NO: 534, including one or more post-translational modifications of that sequence. In a particular embodiment, the VL comprises one, two or three CDRs selected from: a. CDR-L1, comprising the amino acid sequence SEQ ID NO: 1076, b. CDR-L2, comprising the amino acid sequence SEQ ID NO: 1618, and c. CDR-L3, comprising the amino acid sequence SEQ ID NO: 2160.

[2938] In one aspect, an antibody or antigen-binding fragment thereof is provided, wherein the antibody or antigen-binding fragment thereof comprises a VH as in any of the embodiments provided above, and a VL as in any of the embodiments provided above. In some embodiments, the antibody or antigen-binding fragment thereof comprises the VH amino acid sequence of SEQ ID NO: 263, and the VL amino acid sequence of SEQ ID NO: 534, optionally including post-translational modifications of those sequences.

### TUCE1008

[2939] In one aspect, the present disclosure provides an antibody or antigen-binding fragment thereof comprising at least one or both variable regions selected from: a. VH comprising the amino acid sequence of SEQ ID NO: 264 and b. VL comprising the amino acid sequence of SEQ ID NO: 535.

[2940] In one aspect, the present disclosure provides an antibody or antigen-binding fragment thereof comprising at least one, two, three, four, five, or six CDRs selected from: a. CDR-H1 comprising the amino acid sequence of SEQ ID NO: 806, b. CDR-H2 comprising the amino acid sequence of SEQ ID NO: 1348, c. CDR-H3 comprising the amino acid sequence of SEQ ID NO: 1890, d. CDR-L1 comprising the amino acid sequence of SEQ ID NO: 1077, e. CDR-L2 comprising the amino acid sequence of SEQ ID NO: 1619, and f. CDR-L3 comprising the amino acid sequence of SEQ ID NO: 2161.

[2941] In one aspect, the present disclosure provides an antibody or antigen-binding fragment thereof comprising a CDR-H3 comprising the amino acid sequence of SEQ ID NO: 1890, and a CDR-L3 comprising the amino acid sequence of SEQ ID NO: 2161.

[2942] In one aspect, the present disclosure provides an antibody or antigen-binding fragment thereof comprising at least one, at least two, or all three VH CDR sequences selected from: a. CDR-H1 comprising the amino acid sequence of SEQ ID NO: 806, b. CDR-H2 comprising the amino acid sequence of SEQ ID NO: 1348, c. CDR-H3 comprising the amino acid sequence of SEQ ID NO: 1890, and a VL comprising the amino acid sequence of SEQ ID NO: 535.

[2943] In one aspect, the present disclosure provides an antibody or antigen-binding fragment thereof comprising at least one, at least two, or all three VL CDR sequences selected from: a. CDR-L1 comprising the amino acid sequence of SEQ ID NO: 1077, b. CDR-L2 comprising the amino acid sequence of SEQ ID NO: 1619, c. CDR-L3 comprising the amino acid sequence of SEQ ID NO: 2161, and a VH comprising the amino acid sequence of SEQ ID NO: 264.

[2944] In one aspect, an antibody or antigen-binding fragment thereof is provided, wherein the antibody or antigen-binding fragment thereof comprises a heavy chain variable domain (VH) having at least 90%, 91%, 92%, 93%, 94%, 95%, 96%, 97%, 98%, 99%, or 100% sequence identity to the amino acid sequence SEQ ID NO: 264. In some embodiments, a VH sequence having at least 90%, 91%, 92%, 93%, 94%, 95%, 96%, 97%, 98%, or 99% identity contains substitutions (e.g., conservative substitutions), insertions, or deletions relative to the reference sequence, but an antibody or antigen-binding fragment thereof comprising that sequence retains the ability to bind to same antigen as of the parent (e.g., cancer associated antigen). In some embodiments, a total of 1 to 10 amino acids have been substituted, inserted and/or deleted in the amino acid sequence SEQ ID NO: 264. In some embodiments, substitutions, insertions, or deletions occur in regions outside the CDRs (e.g., in the FRs). Optionally, the antibody or antigen-binding fragment thereof comprises the VH sequence SEQ ID NO: 264, including one or more post-translational modifications of that sequence. In a particular embodiment, the VH comprises one, two or three CDRs selected from: a. CDR-H1, comprising the amino acid sequence SEQ ID NO: 806, b. CDR-H2, comprising the amino acid sequence SEQ ID NO: 1348, and c. CDR-H3, comprising the amino acid sequence SEQ ID NO: 1890.

[2945] In one aspect, an antibody or antigen-binding fragment thereof is provided, wherein the antibody or antigen-binding fragment thereof comprises a light chain variable domain (VL) having at least 90%, 91%, 92%, 93%, 94%, 95%, 96%, 97%, 98%, 99%, or 100% sequence identity to the amino acid sequence SEQ ID NO: 535. In some embodiments, a VL sequence having at least 90%, 91%, 92%, 93%, 94%, 95%, 96%, 97%, 98%, or 99% identity contains substitutions (e.g., conservative substitutions), insertions, or deletions relative to the reference sequence, but an antibody or antigen-binding fragment thereof comprising that sequence retains the ability to bind to same antigen as the parent (e.g., cancer associated antigen). In some embodiments, a total of 1 to 10 amino acids have been substituted, inserted and/or deleted in the amino acid sequence SEQ ID NO: 535. In some embodiments, the substitutions, insertions, or deletions occur in regions outside the CDRs (e.g., in the FRs). Optionally, the antibody or antigen-binding fragment thereof comprises the VL sequence SEQ ID NO: 535, including one or more post-translational modifications of that sequence. In a particular embodiment, the VL comprises one, two or three CDRs selected from: a. CDR-L1, comprising the amino acid sequence SEQ ID NO: 1077, b. CDR-L2, comprising the amino acid sequence SEQ ID NO: 1619, and c. CDR-L3, comprising the amino acid sequence SEQ ID NO: 2161.

[2946] In one aspect, an antibody or antigen-binding fragment thereof is provided, wherein the antibody or antigen-binding fragment thereof comprises a VH as in any of the embodiments provided above, and a VL as in any of the embodiments provided above. In some embodiments, the antibody or antigen-binding fragment thereof comprises the VH amino acid sequence of SEQ ID NO: 264, and the VL amino acid sequence of SEQ ID NO: 535, optionally including post-translational modifications of those sequences.

### TUCE1009

[2947] In one aspect, the present disclosure provides an antibody or antigen-binding fragment thereof comprising at least one or both variable regions selected from: a. VH comprising the amino acid sequence of SEQ ID NO: 265 and b. VL comprising the amino acid sequence of SEQ ID NO: 536.

[2948] In one aspect, the present disclosure provides an antibody or antigen-binding fragment thereof comprising at least one, two, three, four, five, or six CDRs selected from: a. CDR-H1 comprising the amino acid sequence of SEQ ID NO: 807, b. CDR-H2 comprising the amino acid sequence of SEQ ID NO: 1349, c. CDR-H3 comprising the amino acid sequence of SEQ ID NO: 1891, d. CDR-L1 comprising the amino acid sequence of SEQ ID NO: 1078, e. CDR-L2 comprising the amino acid sequence of SEQ ID NO: 1620, and f. CDR-L3 comprising the amino acid sequence of SEQ ID NO: 2162.

[2949] In one aspect, the present disclosure provides an antibody or antigen-binding fragment thereof comprising a CDR-H3 comprising the amino acid sequence of SEQ ID NO: 1891, and a CDR-L3 comprising the amino acid sequence of SEQ ID NO: 2162.

[2950] In one aspect, the present disclosure provides an antibody or antigen-binding fragment thereof comprising at least one, at least two, or all three VH CDR sequences selected from: a. CDR-H1 comprising the amino acid sequence of SEQ ID NO: 807, b. CDR-H2 comprising the amino acid sequence of SEQ ID NO: 1349, c. CDR-H3 comprising the amino acid sequence of SEQ ID NO: 1891, and a VL comprising the amino acid sequence of SEQ ID NO: 536.

[2951] In one aspect, the present disclosure provides an antibody or antigen-binding fragment thereof comprising at least one, at least two, or all three VL CDR sequences selected from: a. CDR-L1 comprising the amino acid sequence of SEQ ID NO: 1078, b. CDR-L2 comprising the amino acid sequence of SEQ ID NO: 1620, c. CDR-L3 comprising the amino acid sequence of SEQ ID NO: 2162, and a VH comprising the amino acid sequence of SEQ ID NO: 265.

[2952] In one aspect, an antibody or antigen-binding fragment thereof is provided, wherein the antibody or antigen-binding fragment thereof comprises a heavy chain variable domain (VH) having at least 90%, 91%, 92%, 93%, 94%, 95%, 96%, 97%, 98%, 99%, or 100% sequence identity to the amino acid sequence SEQ ID NO: 265. In some embodiments, a VH sequence having at least 90%, 91%, 92%, 93%, 94%, 95%, 96%, 97%, 98%, or 99% identity contains substitutions (e.g., conservative substitutions), insertions, or deletions relative to the reference sequence, but an antibody or antigen-binding fragment thereof comprising that sequence retains the ability to bind to same antigen as of the parent (e.g., cancer associated antigen). In some embodiments, a total of 1 to 10 amino acids have been substituted, inserted and/or deleted in the amino acid sequence SEQ ID NO: 265. In some embodiments, substitutions, insertions, or deletions occur in regions outside the CDRs (e.g., in the FRs). Optionally, the antibody or antigen-binding fragment thereof comprises the VH sequence SEQ ID NO: 265, including one or more post-translational modifications of that sequence. In a particular embodiment, the VH comprises one, two or three CDRs selected from: a. CDR-H1, comprising the amino acid sequence SEQ ID NO: 807, b. CDR-H2, comprising the amino acid sequence SEQ ID NO: 1349, and c. CDR-H3, comprising the amino acid sequence SEQ ID NO: 1891.

[2953] In one aspect, an antibody or antigen-binding fragment thereof is provided, wherein the antibody or antigen-binding fragment thereof comprises a light chain variable domain (VL) having at least 90%, 91%, 92%, 93%, 94%, 95%, 96%, 97%, 98%, 99%, or 100% sequence identity to the amino acid sequence SEQ ID NO: 536. In some embodiments, a VL sequence having at least 90%, 91%, 92%, 93%, 94%, 95%, 96%, 97%, 98%, or 99% identity contains substitutions (e.g., conservative substitutions), insertions, or deletions relative to the reference sequence, but an antibody or antigen-binding fragment thereof comprising that sequence retains the ability to bind to same antigen as the parent (e.g., cancer associated antigen). In some embodiments, a total of 1 to 10 amino acids have been substituted, inserted and/or deleted in the amino acid sequence SEQ ID NO: 536. In some embodiments, the substitutions, insertions, or deletions occur in regions outside the CDRs (e.g., in the FRs). Optionally, the antibody or antigen-binding fragment thereof comprises the VL sequence SEQ ID NO: 536, including one or more post-translational modifications of that sequence. In a particular embodiment, the VL comprises one, two or three CDRs selected from: a. CDR-L1, comprising the amino acid sequence SEQ ID NO: 1078, b. CDR-L2, comprising the amino acid sequence SEQ ID NO: 1620, and c. CDR-L3, comprising the amino acid sequence SEQ ID NO: 2162.

[2954] In one aspect, an antibody or antigen-binding fragment thereof is provided, wherein the antibody or antigen-binding fragment thereof comprises a VH as in any of the embodiments provided above, and a VL as in any of the embodiments provided above. In some embodiments, the antibody or antigen-binding fragment thereof comprises the VH amino acid sequence of SEQ ID NO: 265, and the VL amino acid sequence of SEQ ID NO: 536, optionally including post-translational modifications of those sequences.

### TUCE1010

[2955] In one aspect, the present disclosure provides an antibody or antigen-binding fragment thereof comprising at least one or both variable regions selected from: a. VH comprising the amino acid sequence of SEQ ID NO: 266 and b. VL comprising the amino acid sequence of SEQ ID NO: 537.

[2956] In one aspect, the present disclosure provides an antibody or antigen-binding fragment thereof comprising at least one, two, three, four, five, or six CDRs selected from: a. CDR-H1 comprising the amino acid sequence of SEQ ID NO: 808, b. CDR-H2 comprising the amino acid sequence of SEQ ID NO: 1350, c. CDR-H3 comprising the amino acid sequence of SEQ ID NO: 1892, d. CDR-L1 comprising the amino acid sequence of SEQ ID NO: 1079, e. CDR-L2 comprising the amino acid sequence of SEQ ID NO: 1621, and f. CDR-L3 comprising the amino acid sequence of SEQ ID NO: 2163.

[2957] In one aspect, the present disclosure provides an antibody or antigen-binding fragment thereof comprising a CDR-H3 comprising the amino acid sequence of SEQ ID NO: 1892, and a CDR-L3 comprising the amino acid sequence of SEQ ID NO: 2163.

[2958] In one aspect, the present disclosure provides an antibody or antigen-binding fragment thereof comprising at least one, at least two, or all three VH CDR sequences selected from: a. CDR-H1 comprising the amino acid sequence of SEQ ID NO: 808, b. CDR-H2 comprising the amino acid sequence of SEQ ID NO: 1350, c. CDR-H3 comprising the amino acid sequence of SEQ ID NO: 1892, and a VL comprising the amino acid sequence of SEQ ID NO: 537.

[2959] In one aspect, the present disclosure provides an antibody or antigen-binding fragment thereof comprising at least one, at least two, or all three VL CDR sequences selected from: a. CDR-L1 comprising the amino acid sequence of SEQ ID NO: 1079, b. CDR-L2 comprising the amino acid sequence of SEQ ID NO: 1621, c. CDR-L3 comprising the amino acid sequence of SEQ ID NO: 2163, and a VH comprising the amino acid sequence of SEQ ID NO: 266.

[2960] In one aspect, an antibody or antigen-binding fragment thereof is provided, wherein the antibody or antigen-binding fragment thereof comprises a heavy chain variable domain (VH) having at least 90%, 91%, 92%, 93%, 94%, 95%, 96%, 97%, 98%, 99%, or 100% sequence identity to the amino acid sequence SEQ ID NO: 266. In some embodiments, a VH sequence having at least 90%, 91%, 92%, 93%, 94%, 95%, 96%, 97%, 98%, or 99% identity contains substitutions (e.g., conservative substitutions), insertions, or deletions relative to the reference sequence, but an antibody or antigen-binding fragment thereof comprising that sequence retains the ability to bind to same antigen as of the parent (e.g., cancer associated antigen). In some embodiments, a total of 1 to 10 amino acids have been substituted, inserted and/or deleted in the amino acid sequence SEQ ID NO: 266. In some embodiments, substitutions, insertions, or deletions occur in regions outside the CDRs (e.g., in the FRs). Optionally, the antibody or antigen-binding fragment thereof comprises the VH sequence SEQ ID NO: 266, including one or more post-translational modifications of that sequence. In a particular embodiment, the VH comprises one, two or three CDRs selected from: a. CDR-H1, comprising the amino acid sequence SEQ ID NO: 808, b. CDR-H2, comprising the amino acid sequence SEQ ID NO: 1350, and c. CDR-H3, comprising the amino acid sequence SEQ ID NO: 1892.

[2961] In one aspect, an antibody or antigen-binding fragment thereof is provided, wherein the antibody or antigen-binding fragment thereof comprises a light chain variable domain (VL) having at least 90%, 91%, 92%, 93%, 94%, 95%, 96%, 97%, 98%, 99%, or 100% sequence identity to the amino acid sequence SEQ ID NO: 537. In some embodiments, a VL sequence having at least 90%, 91%, 92%, 93%, 94%, 95%, 96%, 97%, 98%, or 99% identity contains substitutions (e.g., conservative substitutions), insertions, or deletions relative to the reference sequence, but an antibody or antigen-binding fragment thereof comprising that sequence retains the ability to bind to same antigen as the parent (e.g., cancer associated antigen). In some embodiments, a total of 1 to 10 amino acids have been substituted, inserted and/or deleted in the amino acid sequence SEQ ID NO: 537. In some embodiments, the substitutions, insertions, or deletions occur in regions outside the CDRs (e.g., in the FRs). Optionally, the antibody or antigen-binding fragment thereof comprises the VL sequence SEQ ID NO: 537, including one or more post-translational modifications of that sequence. In a particular embodiment, the VL comprises one, two or three CDRs selected from: a. CDR-L1, comprising the amino acid sequence SEQ ID NO: 1079, b. CDR-L2, comprising the amino acid sequence SEQ ID NO: 1621, and c. CDR-L3, comprising the amino acid sequence SEQ ID NO: 2163.

[2962] In one aspect, an antibody or antigen-binding fragment thereof is provided, wherein the antibody or antigen-binding fragment thereof comprises a VH as in any of the embodiments provided above, and a VL as in any of the embodiments provided above. In some embodiments, the antibody or antigen-binding fragment thereof comprises the VH amino acid sequence of SEQ ID NO: 266, and the VL amino acid sequence of SEQ ID NO: 537, optionally including post-translational modifications of those sequences.

### TUCS1001

[2963] In one aspect, the present disclosure provides an antibody or antigen-binding fragment thereof comprising at least one or both variable regions selected from: a. VH comprising the amino acid sequence of SEQ ID NO: 267 and b. VL comprising the amino acid sequence of SEQ ID NO: 538.

[2964] In one aspect, the present disclosure provides an antibody or antigen-binding fragment thereof comprising at least one, two, three, four, five, or six CDRs selected from: a. CDR-H1 comprising the amino acid sequence of SEQ ID NO: 809, b. CDR-H2 comprising the amino acid sequence of SEQ ID NO: 1351, c. CDR-H3 comprising the amino acid sequence of SEQ ID NO: 1893, d. CDR-L1 comprising the amino acid sequence of SEQ ID NO: 1080, e. CDR-L2 comprising the amino acid sequence of SEQ ID NO: 1622, and f. CDR-L3 comprising the amino acid sequence of SEQ ID NO: 2164.

[2965] In one aspect, the present disclosure provides an antibody or antigen-binding fragment thereof comprising a CDR-H3 comprising the amino acid sequence of SEQ ID NO: 1893, and a CDR-L3 comprising the amino acid sequence of SEQ ID NO: 2164.

[2966] In one aspect, the present disclosure provides an antibody or antigen-binding fragment thereof comprising at least one, at least two, or all three VH CDR sequences selected from: a. CDR-H1 comprising the amino acid sequence of SEQ ID NO: 809, b. CDR-H2 comprising the amino acid sequence of SEQ ID NO: 1351, c. CDR-H3 comprising the amino acid sequence of SEQ ID NO: 1893, and a VL comprising the amino acid sequence of SEQ ID NO: 538.

[2967] In one aspect, the present disclosure provides an antibody or antigen-binding fragment thereof comprising at least one, at least two, or all three VL CDR sequences selected from: a. CDR-L1 comprising the amino acid sequence of SEQ ID NO: 1080, b. CDR-L2 comprising the amino acid sequence of SEQ ID NO: 1622, c. CDR-L3 comprising the amino acid sequence of SEQ ID NO: 2164, and a VH comprising the amino acid sequence of SEQ ID NO: 267.

[2968] In one aspect, an antibody or antigen-binding fragment thereof is provided, wherein the antibody or antigen-binding fragment thereof comprises a heavy chain variable domain (VH) having at least 90%, 91%, 92%, 93%, 94%, 95%, 96%, 97%, 98%, 99%, or 100% sequence identity to the amino acid sequence SEQ ID NO: 267. In some embodiments, a VH sequence having at least 90%, 91%, 92%, 93%, 94%, 95%, 96%, 97%, 98%, or 99% identity contains substitutions (e.g., conservative substitutions), insertions, or deletions relative to the reference sequence, but an antibody or antigen-binding fragment thereof comprising that sequence retains the ability to bind to same antigen as of the parent (e.g., cancer associated antigen). In some embodiments, a total of 1 to 10 amino acids have been substituted, inserted and/or deleted in the amino acid sequence SEQ ID NO: 267. In some embodiments, substitutions, antigen-binding fragment thereof comprises the VH sequence SEQ ID NO: 267, including one or more post-translational modifications of that sequence. In a particular embodiment, the VH comprises one, two or three CDRs selected from: a. CDR-H1, comprising the amino acid sequence SEQ ID NO: 809, b. CDR-H2, comprising the amino acid sequence SEQ ID NO: 1351, and c. CDR-H3, comprising the amino acid sequence SEQ ID NO: 1893.

[2969] In one aspect, an antibody or antigen-binding fragment thereof is provided, wherein the antibody or antigen-binding fragment thereof comprises a light chain variable domain (VL) having at least 90%, 91%, 92%, 93%, 94%, 95%, 96%, 97%, 98%, 99%, or 100% sequence identity to the amino acid sequence SEQ ID NO: 538. In some embodiments, a VL sequence having at least 90%, 91%, 92%, 93%, 94%, 95%, 96%, 97%, 98%, or 99% identity contains substitutions (e.g., conservative substitutions), insertions, or deletions relative to the reference sequence, but an antibody or antigen-binding fragment thereof comprising that sequence retains the ability to bind to same antigen as the parent (e.g., cancer associated antigen). In some embodiments, a total of 1 to 10 amino acids have been substituted, inserted and/or deleted in the amino acid sequence SEQ ID NO: 538. In some embodiments, the substitutions, insertions, or deletions occur in regions outside the CDRs (e.g., in the FRs). Optionally, the antibody or antigen-binding fragment thereof comprises the VL sequence SEQ ID NO: 538, including one or more post-translational modifications of that sequence. In a particular embodiment, the VL comprises one, two or three CDRs selected from: a. CDR-L1, comprising the amino acid sequence SEQ ID NO: 1080, b. CDR-L2, comprising the amino acid sequence SEQ ID NO: 1622, and c. CDR-L3, comprising the amino acid sequence SEQ ID NO: 2164.

[2970] In one aspect, an antibody or antigen-binding fragment thereof is provided, wherein the antibody or antigen-binding fragment thereof comprises a VH as in any of the embodiments provided above, and a VL as in any of the embodiments provided above. In some embodiments, the antibody or antigen-binding fragment thereof comprises the VH amino acid sequence of SEQ ID NO: 267, and the VL amino acid sequence of SEQ ID NO: 538, optionally including post-translational modifications of those sequences.

### TUCS1002

[2971] In one aspect, the present disclosure provides an antibody or antigen-binding fragment thereof comprising at least one or both variable regions selected from: a. VH comprising the amino acid sequence of SEQ ID NO: 268 and b. VL comprising the amino acid sequence of SEQ ID NO: 539.

[2972] In one aspect, the present disclosure provides an antibody or antigen-binding fragment thereof comprising at least one, two, three, four, five, or six CDRs selected from: a. CDR-H1 comprising the amino acid sequence of SEQ ID NO: 810, b. CDR-H2 comprising the amino acid sequence of SEQ ID NO: 1352, c. CDR-H3 comprising the amino acid sequence of SEQ ID NO: 1894, d. CDR-L1 comprising the amino acid sequence of SEQ ID NO: 1081, e. CDR-L2 comprising the amino acid sequence of SEQ ID NO: 1623, and f. CDR-L3 comprising the amino acid sequence of SEQ ID NO: 2165.

[2973] In one aspect, the present disclosure provides an antibody or antigen-binding fragment thereof comprising a CDR-H3 comprising the amino acid sequence of SEQ ID NO: 1894, and a CDR-L3 comprising the amino acid sequence of SEQ ID NO: 2165.

[2974] In one aspect, the present disclosure provides an antibody or antigen-binding fragment thereof comprising at least one, at least two, or all three VH CDR sequences selected from: a. CDR-H1 comprising the amino acid sequence of SEQ ID NO: 810, b. CDR-H2 comprising the amino acid sequence of SEQ ID NO: 1352, c. CDR-H3 comprising the amino acid sequence of SEQ ID NO: 1894, and a VL comprising the amino acid sequence of SEQ ID NO: 539.

[2975] In one aspect, the present disclosure provides an antibody or antigen-binding fragment thereof comprising at least one, at least two, or all three VL CDR sequences selected from: a. CDR-L1 comprising the amino acid sequence of SEQ ID NO: 1081, b. CDR-L2 comprising the amino acid sequence of SEQ ID NO: 1623, c. CDR-L3 comprising the amino acid sequence of SEQ ID NO: 2165, and a VH comprising the amino acid sequence of SEQ ID NO: 268.

[2976] In one aspect, an antibody or antigen-binding fragment thereof is provided, wherein the antibody or antigen-binding fragment thereof comprises a heavy chain variable domain (VH) having at least 90%, 91%, 92%, 93%, 94%, 95%, 96%, 97%, 98%, 99%, or 100% sequence identity to the amino acid sequence SEQ ID NO: 268. In some embodiments, a VH sequence having at least 90%, 91%, 92%, 93%, 94%, 95%, 96%, 97%, 98%, or 99% identity contains substitutions (e.g., conservative substitutions), insertions, or deletions relative to the reference sequence, but an antibody or antigen-binding fragment thereof comprising that sequence retains the ability to bind to same antigen as of the parent (e.g., cancer associated antigen). In some embodiments, a total of 1 to 10 amino acids have been substituted, inserted and/or deleted in the amino acid sequence SEQ ID NO: 268. In some embodiments, substitutions, insertions, or deletions occur in regions outside the CDRs (e.g., in the FRs). Optionally, the antibody or antigen-binding fragment thereof comprises the VH sequence SEQ ID NO: 268, including one or more post-translational modifications of that sequence. In a particular embodiment, the VH comprises one, two or three CDRs selected from: a. CDR-H1, comprising the amino acid sequence SEQ ID NO: 810, b. CDR-H2, comprising the amino acid sequence SEQ ID NO: 1352, and c. CDR-H3, comprising the amino acid sequence SEQ ID NO: 1894.

[2977] In one aspect, an antibody or antigen-binding fragment thereof is provided, wherein the antibody or antigen-binding fragment thereof comprises a light chain variable domain (VL) having at least 90%, 91%, 92%, 93%, 94%, 95%, 96%, 97%, 98%, 99%, or 100% sequence identity to the amino acid sequence SEQ ID NO: 539. In some embodiments, a VL sequence having at least 90%, 91%, 92%, 93%, 94%, 95%, 96%, 97%, 98%, or 99% identity contains substitutions (e.g., conservative substitutions), insertions, or deletions relative to the reference sequence, but an antibody or antigen-binding fragment thereof comprising that sequence retains the ability to bind to same antigen as the parent (e.g., cancer associated antigen). In some embodiments, a total of 1 to 10 amino acids have been substituted, inserted and/or deleted in the amino acid sequence SEQ ID NO: 539. In some embodiments, the substitutions, insertions, or deletions occur in regions outside the CDRs (e.g., in the FRs). Optionally, the antibody or antigen-binding fragment thereof comprises the VL sequence SEQ ID NO: 539, including one or more post-translational modifications of that sequence. In a particular embodiment, the VL comprises one, two or three CDRs selected from: a. CDR-L1, comprising the amino acid sequence SEQ ID NO: 1081, b. CDR-L2, comprising the amino acid sequence SEQ ID NO: 1623, and c. CDR-L3, comprising the amino acid sequence SEQ ID NO: 2165.

[2978] In one aspect, an antibody or antigen-binding fragment thereof is provided, wherein the antibody or antigen-binding fragment thereof comprises a VH as in any of the embodiments provided above, and a VL as in any of the embodiments provided above. In some embodiments, the antibody or antigen-binding fragment thereof comprises the VH amino acid sequence of SEQ ID NO: 268, and the VL amino acid sequence of SEQ ID NO: 539, optionally including post-translational modifications of those sequences.

### TUCS1003

[2979] In one aspect, the present disclosure provides an antibody or antigen-binding fragment thereof comprising at least one or both variable regions selected from: a. VH comprising the amino acid sequence of SEQ ID NO: 269 and b. VL comprising the amino acid sequence of SEQ ID NO: 540.

[2980] In one aspect, the present disclosure provides an antibody or antigen-binding fragment thereof comprising at least one, two, three, four, five, or six CDRs selected from: a. CDR-H1 comprising the amino acid sequence of SEQ ID NO: 811, b. CDR-H2 comprising the amino acid sequence of SEQ ID NO: 1353, c. CDR-H3 comprising the amino acid sequence of SEQ ID NO: 1895, d. CDR-L1 comprising the amino acid sequence of SEQ ID NO: 1082, e. CDR-L2 comprising the amino acid sequence of SEQ ID NO: 1624, and f. CDR-L3 comprising the amino acid sequence of SEQ ID NO: 2166.

[2981] In one aspect, the present disclosure provides an antibody or antigen-binding fragment thereof comprising a CDR-H3 comprising the amino acid sequence of SEQ ID NO: 1895, and a CDR-L3 comprising the amino acid sequence of SEQ ID NO: 2166.

[2982] In one aspect, the present disclosure provides an antibody or antigen-binding fragment thereof comprising at least one, at least two, or all three VH CDR sequences selected from: a. CDR-H1 comprising the amino acid sequence of SEQ ID NO: 811, b. CDR-H2 comprising the amino acid sequence of SEQ ID NO: 1353, c. CDR-H3 comprising the amino acid sequence of SEQ ID NO: 1895, and a VL comprising the amino acid sequence of SEQ ID NO: 540.

[2983] In one aspect, the present disclosure provides an antibody or antigen-binding fragment thereof comprising at least one, at least two, or all three VL CDR sequences selected from: a. CDR-L1 comprising the amino acid sequence of SEQ ID NO: 1082, b. CDR-L2 comprising the amino acid sequence of SEQ ID NO: 1624, c. CDR-L3 comprising the amino acid sequence of SEQ ID NO: 2166, and a VH comprising the amino acid sequence of SEQ ID NO: 269.

[2984] In one aspect, an antibody or antigen-binding fragment thereof is provided, wherein the antibody or antigen-binding fragment thereof comprises a heavy chain variable domain (VH) having at least 90%, 91%, 92%, 93%, 94%, 95%, 96%, 97%, 98%, 99%, or 100% sequence identity to the amino acid sequence SEQ ID NO: 269. In some embodiments, a VH sequence having at least 90%, 91%, 92%, 93%, 94%, 95%, 96%, 97%, 98%, or 99% identity contains substitutions (e.g., conservative substitutions), insertions, or deletions relative to the reference sequence, but an antibody or antigen-binding fragment thereof comprising that sequence retains the ability to bind to same antigen as of the parent (e.g., cancer associated antigen). In some embodiments, a total of 1 to 10 amino acids have been substituted, inserted and/or deleted in the amino acid sequence SEQ ID NO: 269. In some embodiments, substitutions, insertions, or deletions occur in regions outside the CDRs (e.g., in the FRs). Optionally, the antibody or antigen-binding fragment thereof comprises the VH sequence SEQ ID NO: 269, including one or more post-translational modifications of that sequence. In a particular embodiment, the VH comprises one, two or three CDRs selected from: a. CDR-H1, comprising the amino acid sequence SEQ ID NO: 811, b. CDR-H2, comprising the amino acid sequence SEQ ID NO: 1353, and c. CDR-H3, comprising the amino acid sequence SEQ ID NO: 1895.

[2985] In one aspect, an antibody or antigen-binding fragment thereof is provided, wherein the antibody or antigen-binding fragment thereof comprises a light chain variable domain (VL) having at least 90%, 91%, 92%, 93%, 94%, 95%, 96%, 97%, 98%, 99%, or 100% sequence identity to the amino acid sequence SEQ ID NO: 540. In some embodiments, a VL sequence having at least 90%, 91%, 92%, 93%, 94%, 95%, 96%, 97%, 98%, or 99% identity contains substitutions (e.g., conservative substitutions), insertions, or deletions relative to the reference sequence, but an antibody or antigen-binding fragment thereof comprising that sequence retains the ability to bind to same antigen as the parent (e.g., cancer associated antigen). In some embodiments, a total of 1 to 10 amino acids have been substituted, inserted and/or deleted in the amino acid sequence SEQ ID NO: 540. In some embodiments, the substitutions, insertions, or deletions occur in regions outside the CDRs (e.g., in the FRs). Optionally, the antibody or antigen-binding fragment thereof comprises the VL sequence SEQ ID NO: 540, including one or more post-translational modifications of that sequence. In a particular embodiment, the VL comprises one, two or three CDRs selected from: a. CDR-L1, comprising the amino acid sequence SEQ ID NO: 1082, b. CDR-L2, comprising the amino acid sequence SEQ ID NO: 1624, and c. CDR-L3, comprising the amino acid sequence SEQ ID NO: 2166.

[2986] In one aspect, an antibody or antigen-binding fragment thereof is provided, wherein the antibody or antigen-binding fragment thereof comprises a VH as in any of the embodiments provided above, and a VL as in any of the embodiments provided above. In some embodiments, the antibody or antigen-binding fragment thereof comprises the VH amino acid sequence of SEQ ID NO: 269, and the VL amino acid sequence of SEQ ID NO: 540, optionally including post-translational modifications of those sequences.

### TUVM1001

[2987] In one aspect, the present disclosure provides an antibody or antigen-binding fragment thereof comprising at least one or both variable regions selected from: a. VH comprising the amino acid sequence of SEQ ID NO: 270 and b. VL comprising the amino acid sequence of SEQ ID NO: 541.

[2988] In one aspect, the present disclosure provides an antibody or antigen-binding fragment thereof comprising at least one, two, three, four, five, or six CDRs selected from: a. CDR-H1 comprising the amino acid sequence of SEQ ID NO: 812, b. CDR-H2 comprising the amino acid sequence of SEQ ID NO: 1354, c. CDR-H3 comprising the amino acid sequence of SEQ ID NO: 1896, d. CDR-L1 comprising the amino acid sequence of SEQ ID NO: 1083, e. CDR-L2 comprising the amino acid sequence of SEQ ID NO: 1625, and f. CDR-L3 comprising the amino acid sequence of SEQ ID NO: 2167.

[2989] In one aspect, the present disclosure provides an antibody or antigen-binding fragment thereof comprising a CDR-H3 comprising the amino acid sequence of SEQ ID NO: 1896, and a CDR-L3 comprising the amino acid sequence of SEQ ID NO: 2167.

[2990] In one aspect, the present disclosure provides an antibody or antigen-binding fragment thereof comprising at least one, at least two, or all three VH CDR sequences selected from: a. CDR-H1 comprising the amino acid sequence of SEQ ID NO: 812, b. CDR-H2 comprising the amino acid sequence of SEQ ID NO: 1354, c. CDR-H3 comprising the amino acid sequence of SEQ ID NO: 1896, and a VL comprising the amino acid sequence of SEQ ID NO: 541.

[2991] In one aspect, the present disclosure provides an antibody or antigen-binding fragment thereof comprising at least one, at least two, or all three VL CDR sequences selected from: a. CDR-L1 comprising the amino acid sequence of SEQ ID NO: 1083, b. CDR-L2 comprising the amino acid sequence of SEQ ID NO: 1625, c. CDR-L3 comprising the amino acid sequence of SEQ ID NO: 2167, and a VH comprising the amino acid sequence of SEQ ID NO: 270.

[2992] In one aspect, an antibody or antigen-binding fragment thereof is provided, wherein the antibody or antigen-binding fragment thereof comprises a heavy chain variable domain (VH) having at least 90%, 91%, 92%, 93%, 94%, 95%, 96%, 97%, 98%, 99%, or 100% sequence identity to the amino acid sequence SEQ ID NO: 270. In some embodiments, a VH sequence having at least 90%, 91%, 92%, 93%, 94%, 95%, 96%, 97%, 98%, or 99% identity contains substitutions (e.g., conservative substitutions), insertions, or deletions relative to the reference sequence, but an antibody or antigen-binding fragment thereof comprising that sequence retains the ability to bind to same antigen as of the parent (e.g., cancer associated antigen). In some embodiments, a total of 1 to 10 amino acids have been substituted, inserted and/or deleted in the amino acid sequence SEQ ID NO: 270. In some embodiments, substitutions, insertions, or deletions occur in regions outside the CDRs (e.g., in the FRs). Optionally, the antibody or antigen-binding fragment thereof comprises the VH sequence SEQ ID NO: 270, including one or more post-translational modifications of that sequence. In a particular embodiment, the VH comprises one, two or three CDRs selected from: a. CDR-H1, comprising the amino acid sequence SEQ ID NO: 812, b. CDR-H2, comprising the amino acid sequence SEQ ID NO: 1354, and c. CDR-H3, comprising the amino acid sequence SEQ ID NO: 1896.

[2993] In one aspect, an antibody or antigen-binding fragment thereof is provided, wherein the antibody or antigen-binding fragment thereof comprises a light chain variable domain (VL) having at least 90%, 91%, 92%, 93%, 94%, 95%, 96%, 97%, 98%, 99%, or 100% sequence identity to the amino acid sequence SEQ ID NO: 541. In some embodiments, a VL sequence having at least 90%, 91%, 92%, 93%, 94%, 95%, 96%, 97%, 98%, or 99% identity contains substitutions (e.g., conservative substitutions), insertions, or deletions relative to the reference sequence, but an antibody or antigen-binding fragment thereof comprising that sequence retains the ability to bind to same antigen as the parent (e.g., cancer associated antigen). In some embodiments, a total of 1 to 10 amino acids have been substituted, inserted and/or deleted in the amino acid sequence SEQ ID NO: 541. In some embodiments, the substitutions, antigen-binding fragment thereof comprises the VL sequence SEQ ID NO: 541, including one or more post-translational modifications of that sequence. In a particular embodiment, the VL comprises one, two or three CDRs selected from: a. CDR-L1, comprising the amino acid sequence SEQ ID NO: 1083, b. CDR-L2, comprising the amino acid sequence SEQ ID NO: 1625, and c. CDR-L3, comprising the amino acid sequence SEQ ID NO: 2167.

[2994] In one aspect, an antibody or antigen-binding fragment thereof is provided, wherein the antibody or antigen-binding fragment thereof comprises a VH as in any of the embodiments provided above, and a VL as in any of the embodiments provided above. In some embodiments, the antibody or antigen-binding fragment thereof comprises the VH amino acid sequence of SEQ ID NO: 270, and the VL amino acid sequence of SEQ ID NO: 541, optionally including post-translational modifications of those sequences.

### TUVM1002

[2995] In one aspect, the present disclosure provides an antibody or antigen-binding fragment thereof comprising at least one or both variable regions selected from: a. VH comprising the amino acid sequence of SEQ ID NO: 271 and b. VL comprising the amino acid sequence of SEQ ID NO: 542.

[2996] In one aspect, the present disclosure provides an antibody or antigen-binding fragment thereof comprising at least one, two, three, four, five, or six CDRs selected from: a. CDR-H1 comprising the amino acid sequence of SEQ ID NO: 813, b. CDR-H2 comprising the amino acid sequence of SEQ ID NO: 1355, c. CDR-H3 comprising the amino acid sequence of SEQ ID NO: 1897, d. CDR-L1 comprising the amino acid sequence of SEQ ID NO: 1084, e. CDR-L2 comprising the amino acid sequence of SEQ ID NO: 1626, and f. CDR-L3 comprising the amino acid sequence of SEQ ID NO: 2168.

[2997] In one aspect, the present disclosure provides an antibody or antigen-binding fragment thereof comprising a CDR-H3 comprising the amino acid sequence of SEQ ID NO: 1897, and a CDR-L3 comprising the amino acid sequence of SEQ ID NO: 2168.

[2998] In one aspect, the present disclosure provides an antibody or antigen-binding fragment thereof comprising at least one, at least two, or all three VH CDR sequences selected from: a. CDR-H1 comprising the amino acid sequence of SEQ ID NO: 813, b. CDR-H2 comprising the amino acid sequence of SEQ ID NO: 1355, c. CDR-H3 comprising the amino acid sequence of SEQ ID NO: 1897, and a VL comprising the amino acid sequence of SEQ ID NO: 542.

[2999] In one aspect, the present disclosure provides an antibody or antigen-binding fragment thereof comprising at least one, at least two, or all three VL CDR sequences selected from: a. CDR-L1 comprising the amino acid sequence of SEQ ID NO: 1084, b. CDR-L2 comprising the amino acid sequence of SEQ ID NO: 1626, c. CDR-L3 comprising the amino acid sequence of SEQ ID NO: 2168, and a VH comprising the amino acid sequence of SEQ ID NO: 271.

[3000] In one aspect, an antibody or antigen-binding fragment thereof is provided, wherein the antibody or antigen-binding fragment thereof comprises a heavy chain variable domain (VH) having at least 90%, 91%, 92%, 93%, 94%, 95%, 96%, 97%, 98%, 99%, or 100% sequence identity to the amino acid sequence SEQ ID NO: 271. In some embodiments, a VH sequence having at least 90%, 91%, 92%, 93%, 94%, 95%, 96%, 97%, 98%, or 99% identity contains substitutions (e.g., conservative substitutions), thereof comprising that sequence retains the ability to bind to same antigen as of the parent (e.g., cancer associated antigen). In some embodiments, a total of 1 to 10 amino acids have been substituted, inserted and/or deleted in the amino acid sequence SEQ ID NO: 271. In some embodiments, substitutions, insertions, or deletions occur in regions outside the CDRs (e.g., in the FRs). Optionally, the antibody or antigen-binding fragment thereof comprises the VH sequence SEQ ID NO: 271, including one or more post-translational modifications of that sequence. In a particular embodiment, the VH comprises one, two or three CDRs selected from: a. CDR-H1, comprising the amino acid sequence SEQ ID NO: 813, b. CDR-H2, comprising the amino acid sequence SEQ ID NO: 1355, and a. CDR-H3, comprising the amino acid sequence SEQ ID NO: 1897.

[3001] In one aspect, an antibody or antigen-binding fragment thereof is provided, wherein the antibody or antigen-binding fragment thereof comprises a light chain variable domain (VL) having at least 90%, 91%, 92%, 93%, 94%, 95%, 96%, 97%, 98%, 99%, or 100% sequence identity to the amino acid sequence SEQ ID NO: 542. In some embodiments, a VL sequence having at least 90%, 91%, 92%, 93%, 94%, 95%, 96%, 97%, 98%, or 99% identity contains substitutions (e.g., conservative substitutions), insertions, or deletions relative to the reference sequence, but an antibody or antigen-binding fragment thereof comprising that sequence retains the ability to bind to same antigen as the parent (e.g., cancer associated antigen). In some embodiments, a total of 1 to 10 amino acids have been substituted, inserted and/or deleted in the amino acid sequence SEQ ID NO: 542. In some embodiments, the substitutions, insertions, or deletions occur in regions outside the CDRs (e.g., in the FRs). Optionally, the antibody or antigen-binding fragment thereof comprises the VL sequence SEQ ID NO: 542, including one or more post-translational modifications of that sequence. In a particular embodiment, the VL comprises one, two or three CDRs selected from: a. CDR-L1, comprising the amino acid sequence SEQ ID NO: 1084, b. CDR-L2, comprising the amino acid sequence SEQ ID NO: 1626, and c. CDR-L3, comprising the amino acid sequence SEQ ID NO: 2168.

[3002] In one aspect, an antibody or antigen-binding fragment thereof is provided, wherein the antibody or antigen-binding fragment thereof comprises a VH as in any of the embodiments provided above, and a VL as in any of the embodiments provided above. In some embodiments, the antibody or antigen-binding fragment thereof comprises the VH amino acid sequence of SEQ ID NO: 271, and the VL amino acid sequence of SEQ ID NO: 542, optionally including post-translational modifications of those sequences.

### Mutation Frequency

[3003] The antibodies or antigen-binding fragment thereof of the present disclosure can comprise a heavy chain sequence with a mutation frequency of at least about 5%, 6%, 7%, 8%, 9%, 10%, 11%, 12%, 13%, 14%, 15%, 16%, 17%, 18%, 19%, or 20%, or higher from a germline sequence. The antibodies of the present disclosure can comprise a CDR3 region that is a light chain sequence with a mutation frequency of at least about 5%, 6%, 7%, 8%, 9%, 10%, 11%, 12%, 13%, 14%, 15%, 16%, 17%, 18%, 19%, or 20%, or higher from a germline sequence. The antibodies or antigen-binding fragment thereof of the invention can comprise a heavy chain and a light chain sequence with a mutation frequency of at least about 5%, 6%, 7%, 8%, 9%, 10%, 11%, 12%, 13%, 14%, 15%, 16%, 17%, 18%, 19%, or 20%, or higher from a germline sequence. The antibodies or antigen-binding fragment thereof of the invention can comprise a VH region from a VH family selected from the group consisting of any one of VH family 4-59.

### Competitive Antibody

[3004] In some embodiments, antibodies which compete with the antibodies provided herein for binding to specified antigens (e.g., antigen in Table 3 and Table 4) are provided. In some embodiments, antibodies compete with the antibodies provided herein for binding to an epitope on the specified antigen.

[3005] In some embodiments, competition assays may be used to identify a monoclonal antibody that competes with an antibody described herein. Competition assays can be used to determine whether two antibodies bind the same epitope by recognizing identical or sterically overlapping epitopes or one antibody competitively inhibits binding of another antibody to the antigen. In some embodiments, such a competing antibody binds to the same epitope that is bound by an antibody described herein. Exemplary competition assays include, but are not limited to, routine assays such as those provided in Harlow and Lane (1988) Antibodies: A Laboratory Manual ch. 14 (Cold Spring Harbor Laboratory, Cold Spring Harbor, N.Y.). Detailed exemplary methods for mapping an epitope to which an antibody binds are provided in Morris (1996) “Epitope Mapping Protocols,” in Methods in Molecular Biology vol. 66 (Humana Press, Totowa, N.J.). In some embodiments, two antibodies are said to bind to the same epitope if each blocks binding of the other by 50% or more. In some embodiments, the antibody that competes with an antibody described herein is a chimeric, humanized or human antibody. In some embodiments, an antibody that competes with a chimeric, humanized, or human antibody as described herein is provided.

[3006] In some embodiments, antibodies that bind to any one or more of the epitopes that the antibodies provided herein are provided. In some embodiments, antibodies that bind and overlap an epitope to which the present antibodies bind to are provided. In some embodiments, an antibody is provided that competes with at least one of the antibodies provided herein. In some embodiments, an antibody is provided that competes with at least two of the antibodies provided herein. In some embodiments, an antibody is provided that competes with at least three of the antibodies provided herein. In some embodiments, the antibody binds to an overlapping epitope as an antibody described in the examples herein. In some embodiments, the entire epitope is bound and/or obstructed by the competing antibody. In some embodiments, a part of the epitope is bound and/or obstructed by the competing antibody. In some embodiments, the competing antibody's paratope binds to at least a part of the epitope of an antibody provided herein. In some embodiments, the competing antibody's paratope binds the target, and a different section of the competing antibody's structure obstruct at least a part of the epitope of an antibody provided herein.

[3007] The term “competition” or “cross-competition” refers to the ability of an antibody molecule, e.g., an antibody molecule that interferes with the binding of an antibody the invention to a target, e.g., antigens in Table 3 and Table 4; is used interchangeably herein. Interference to binding may be direct or indirect (e.g., through allosteric modulation of the antibody molecule or target). The degree to which antibody molecules can interfere with the binding of other antibody molecules to the target and thus whether they can compete can be determined using competitive binding assays, such as FACS analysis, ELISA or BIACORE analysis. In some embodiments, the competitive binding assay is a quantitative competitive assay. In some embodiments, the first antibody molecule has a binding of the first antibody molecule to a target that is greater than or equal to 10%, such as greater than or equal to 20% (e. G., Greater than or equal to 10%, 30% or more, 40% or more, 50% or more, 55% or more, 60% or more, 65% or more, 70% or more, 75% or more, 80% or more, 85% or more, 90% %, More than 99%, compared to the antibody of the second antibody molecule.

### Methods of Making Antibodies

[3008] The antibodies or antigen binding fragment thereof of the present disclosure can be obtained using the in silico reconstructed, complete nucleic acid sequences and amino acid sequences of cancer associated antibodies or antigen binding fragment thereof disclosed herein. In some embodiments, antibodies or antigen binding fragment thereof prepared by the methods described below are provided. In some embodiments, the antibody or antigen binding fragment thereof is prepared in a host cell. In some embodiments, the antibody or antigen binding fragment thereof is isolated from a host cell. In some embodiments, the antibody or antigen binding fragment thereof is prepared in a cell-free system. In some embodiments, the antibody or antigen binding fragment thereof is purified. The present invention also provides a method of producing an antibody molecule of the invention, said method generally comprising the steps of Culturing a host cell comprising an expression vector comprising a nucleic acid encoding an antibody molecule of the invention under conditions permitting the formation of an antibody of the invention; isolating the antibody molecule expressed by the host cell from the culture; And Optionally, further purifying and/or modifying and/or formulating an antibody molecule of the invention.

[3009] Nucleic acid molecules encoding the antibodies or antigen binding fragment thereof of the present disclosure can be isolated, for example, from mature mammalian B lymphocyte or when fused with an immortalized cell as part of a hybridoma culture, using conventional procedures (e.g., by using oligonucleotide probes that are capable of binding specifically to genes encoding the heavy and light chains of a desired antibody). The disclosure provides isolated nucleic acid molecule comprising a nucleic acid sequence encoding an antibody polypeptide or antigen binding fragment thereof. Isolated nucleic acid molecule comprising the sequences disclosed herein can be prepared using (a) recombinant methods, (b) synthetic techniques, (c) purification techniques, and/or (d) combinations thereof, as is well known in the art and discussed below. Messenger RNA coding for the antibodies or antigen binding fragment thereof (e.g., heavy or light chain) can be isolated from a suitable source, either mature B cells or a hybridoma culture, employing standard techniques of RNA isolation, and the use of oligo-dT cellulose chromatography to segregate the poly-A mRNA. The poly-A mRNA may, further, be fractionated to obtain sequences of sufficient size to code for the amino acid sequences in the light or heavy chain of the desired antibody as the case may be.

[3010] For example, a cDNA library may be constructed by reverse transcription of polyA+mRNA, preferably membrane-associated mRNA, and the library screened using a suitable primer, preferably a nucleic acid sequence which is characteristic of the desired cDNA. Such a primer can be easily hypothesized and synthesized based on the cDNA or the amino acid sequence of an antibody if the sequence is known, for example, the primer can be synthesized based on the nucleic acid sequence or the amino acid sequence of the antibodies disclosed herein.

[3011] In some embodiments, however, the polymerase chain reaction (PCR) using the primers described above is used to amplify cDNAs (or portions of full-length cDNAs) encoding one or more immunoglobulin gene segment of interest (e.g., a light chain variable segment). The amplified sequences can be readily cloned into any suitable vector, e.g., expression vectors, minigene vectors, or phage display vectors. In some embodiments, the nucleic acid sequence of the antibodies or antigen binding fragment thereof, of the present disclosure can be readily cloned into any suitable vector, e.g., expression vectors, minigene vectors, or phage display vectors. Cloning is carried out using standard techniques (see, e.g., Sambrook et al. (1989) Molecular Cloning: A Laboratory Guide, Vols 1-3, Cold Spring Harbor Press, which is incorporated herein by reference). It will be appreciated that the particular method of cloning used not critical, so long as it is possible to determine the sequence of some portion of the immunoglobulin polypeptide of interest.

[3012] One source for RNA used for cloning and isolating nucleic acid sequence encoding a desired antibody or antigen-binding fragment thereof, is a hybridoma produced by fusing a B cell producing the antibody to an immortal cell. An advantage of using hybridomas is that they can be easily screened, and a hybridoma that produces the antibody of interest selected. Alternatively, RNA can be isolated from antibody-producing cells (e.g., B-cells) from the peripheral blood or, preferably the spleen or lymph nodes, or whole spleen, of a subject (e.g., humans or other suitable animals). In some embodiments, the human or suitable animal has been immunized against a target antigen. Recombinant antigens or fragments thereof can be used to immunize mice to generate the hybridomas that produce the antibodies of the instant disclosure. In some embodiments, provided herein is a hybridoma generating the antibodies or the present disclosure. The antigen may include an antigenic polypeptide, a fusion protein or variants thereof. Depending upon the nature of the polypeptides (i.e., percent hydrophobicity, percent hydrophilicity, stability, net charge, isoelectric point etc.), it may be useful to conjugate the antigen to a protein known to be immunogenic in the mammal being immunized. As it relates to the present disclosure, the subject can be one suffering from a cancer.

[3013] Based on the in silico reconstructed nucleic acid and amino acid sequences of the cancer associated antibody, the isolated nucleic acid molecule encoding a cancer associated antibody or an antigen binding fragment thereof, can also be prepared by direct chemical synthesis by known methods (see, e.g., Ausubel et al., Supra, WO1999014318A1). Chemical synthesis generally produces a single stranded oligonucleotide, which can become dsDNA by hybridization with a complementary sequence, or by polymerization with a DNA polymerase using the single strand as a template. One skilled in the art will recognize that while chemical synthesis of DNA can be limited to sequences of about 100 or more bases, longer sequences may be obtained by the ligation of shorter sequences.

[3014] The disclosure provides isolated nucleic acid molecule comprising a nucleic acid sequence encoding an antibody polypeptide or antigen-binding fragment thereof. In some embodiments, the isolated nucleic acid molecule comprises a nucleic acid sequence encoding a heavy chain polypeptide of an antibody. In some embodiments, the nucleic acid sequence encoding a heavy chain polypeptide is selected from any one of SEQ ID NOS: 2169-2439. In some embodiments, the isolated nucleic acid molecule comprises a nucleic acid sequence encoding a light chain polypeptide of an antibody. In some embodiments, the nucleic acid sequence encoding a light chain polypeptide is selected from any one of SEQ ID NOS: 2440-2710. In some embodiments, the isolated nucleic acid molecule comprises a nucleic acid sequence encoding a CDR1, CDR2, or CDR3 polypeptide of a variable heavy chain. In some embodiments, the isolated nucleic acid molecule comprises a nucleic acid sequence encoding a CDR1, CDR2, or CDR3 polypeptide of a variable light chain. In some embodiments, the nucleic acid sequence encoding the CDR1 polypeptide of a variable heavy chain (CDR-H1) is selected from any one of SEQ ID NOS: 2711-2981. In some embodiments, the nucleic acid sequence encoding the CDR2 polypeptide of a variable heavy chain (CDR-H2) is selected from any one of SEQ ID NOS: 3253-3523. In some embodiments, the nucleic acid sequence the nucleic acid sequence encoding the CDR3 polypeptide of a variable heavy chain (CDR-H3) is selected from any one of SEQ ID NOS: 3795-4065. In some embodiments, the isolated nucleic acid comprises a sequence encoding a CDR1, CDR2, or CDR3 polypeptide of a variable light chain. In some embodiments, the nucleic acid sequence encoding the CDR1 region of a variable light chain polypeptide (CDR-L1) is selected from any one of SEQ ID NOS: 2982-3252. In some embodiments, the nucleic acid sequence encoding the CDR2 region of a variable light chain polypeptide (CDR-L2) is selected from any one of SEQ ID NOS: 3524-3794. In some embodiments, the nucleic acid sequence encoding the CDR3 region of a variable light chain polypeptide (CDR-L3) is selected from any one of SEQ ID NOS: 4066-4336.

[3015] The terms “nucleic acid molecule”, “nucleic acid” and “polynucleotide” may be used interchangeably, and refer to a polymer of nucleotides. Such polymers of nucleotides may contain natural and/or non-natural nucleotides, and include, but are not limited to, DNA, RNA, and PNA. “Nucleic acid sequence” refers to the linear sequence of nucleotides.

[3016] As used herein, an “isolated” nucleic acid molecule or “isolated” nucleic acid sequence is a nucleic acid molecule that is either (1) identified and separated from at least one contaminant nucleic acid molecule with which it is ordinarily associated in the natural source of the nucleic acid or (2) cloned, amplified, tagged, or otherwise distinguished from background nucleic acids such that the sequence of the nucleic acid of interest can be determined, is considered isolated. An isolated nucleic acid molecule is other than in the form or setting in which it is found in nature. Isolated nucleic acid molecules therefore are distinguished from the nucleic acid molecule as it exists in natural cells. However, an isolated nucleic acid molecule includes a nucleic acid molecule contained in cells that ordinarily express the antibody where, for example, the nucleic acid molecule is in a chromosomal location different from that of natural cells. “Isolated nucleic acid”, as used herein, is a nucleic acid that is substantially separated from other genome DNA sequences as well as proteins or complexes such as ribosomes and polymerases, which naturally accompany a native sequence. The term embraces a nucleic acid sequence that has been removed from its naturally occurring environment, and includes recombinant or cloned DNA isolates and chemically synthesized analogues or analogues biologically synthesized by heterologous systems. A substantially pure nucleic acid includes isolated forms of the nucleic acid. Of course, this refers to the nucleic acid as originally isolated and does not exclude genes or sequences later added to the isolated nucleic acid by the hand of man. The term “polypeptide” is used in its conventional meaning, i.e., as a sequence of amino acids.

[3017] An isolated nucleic acid molecule encoding the antibody, portion or polypeptide of the present disclosure can be recombined with vector DNA (e.g., expression vector) in accordance with conventional techniques, including blunt-ended or staggered-ended termini for ligation, restriction enzyme digestion to provide appropriate termini, filling in of cohesive ends as appropriate, alkaline phosphatase treatment to avoid undesirable joining, and ligation with appropriate ligases. Techniques for such manipulations are disclosed, e.g., by Maniatis et al., Molecular Cloning, Lab. Manual (Cold Spring Harbor Lab. Press, NY, 1982 and 1989), and Ausubel, 1987, 1993, and can be used to construct nucleic acid sequences which encode an antibody molecule or antigen binding region thereof. Accordingly, the disclosure provides for a vector or expression vector comprising the isolated nucleic acids set forth herein. In one embodiment, the nucleic acid coding for the light chain and that coding for the heavy chain are isolated separately by the procedures outlined above. In one embodiment, the isolated nucleic acid encoding the light chain and that coding for the heavy chain may be inserted into separate expression plasmids, or together in the same plasmid, so long as each is under suitable promoter and translation control.

[3018] Once the isolated nucleic acid molecule is placed into an expression vector, they are then transfected into host cells such as E. coli cells, simian COS cells, human embryonic kidney 293 cells (e.g., 293E cells), Chinese hamster ovary (CHO) cells, or myeloma cells that do not otherwise produce immunoglobulin protein, to obtain the synthesis of the antibody or an antigen-binding fragment thereof in the recombinant host cells. Recombinant production of antibodies is well known in the art. Many vectors are available. The vector components generally include, but are not limited to, one or more of the following: a signal sequence, an origin of replication, one or more selective marker genes, an enhancer element, a promoter, and a transcription termination sequence.

[3019] The isolated nucleic acid molecules are operably linked to an expression control sequence in the vector DNA. Expression control sequence refers to DNA sequences necessary for the expression of an operably linked coding sequence in a particular host organism. The control sequences that are suitable for prokaryotes, for example, include a promoter, optionally an operator sequence, and a ribosome binding site. Eukaryotic cells are known to utilize promoters, polyadenylation signals, and enhancers. The term “operably linked” or “transcriptional control” refers to functional linkage between a regulatory sequence and a heterologous nucleic acid sequence resulting in expression of the latter. For example, a first nucleic acid sequence is operably linked with a second nucleic acid sequence when the first nucleic acid sequence is placed in a functional relationship with the second nucleic acid sequence. For instance, a promoter is operably linked to a coding sequence if the promoter affects the transcription or expression of the coding sequence. Operably linked DNA sequences can be contiguous with each other and, e.g., where necessary to join two protein coding regions, are in the same reading frame.

[3020] Nucleic acid is operably linked when it is placed into a functional relationship with another nucleic acid sequence. For example, a promoter or enhancer is operably linked to a coding sequence if it affects the transcription of the sequence; or a ribosome binding site is operably linked to a coding sequence if it is positioned so as to facilitate translation. Generally, operably linked means that the DNA sequences being linked are contiguous, and/or can contiguous and in reading phase. However, enhancers do not have to be contiguous. Linking is accomplished by ligation at convenient restriction sites. If such sites do not exist, the synthetic oligonucleotide adaptors or linkers are used in accordance with conventional practice.

[3021] Cell, cell line, and cell culture are often used interchangeably and all such designations herein include progeny. Transformants and transformed cells include the primary subject cell and cultures derived therefrom without regard for the number of transfers. It is also understood that all progeny may not be precisely identical in DNA content, due to deliberate or inadvertent mutations. Mutant progeny that have the same function or biological activity as screened for in the originally transformed cell are included. Where distinct designations are intended, it will be clear from the context. In an alternative embodiment, suitable encoding nucleic acid sequences can be designed according to a universal codon table, based on the known amino acid sequence of an immunoglobulin of interest.

[3022] Amino acid sequence variants of the desired antibody may be prepared by introducing appropriate nucleotide changes into the encoding DNA, or by peptide synthesis. Such variants include, for example, deletions from, and/or insertions into and/or substitutions of, residues within the amino acid sequences of the antibodies. Any combination of deletion, insertion, and substitution is made to arrive at the final construct, provided that the final construct possesses the desired characteristics. The amino acid changes also may alter post-translational processes of the monoclonal, human, humanized, or variant antibody, such as changing the number or position of glycosylation sites.

[3023] Nucleic acid molecules encoding amino acid sequence variants of the antibody are prepared by various methods. These methods include, but are not limited to, isolation from a natural source (in the case of naturally occurring amino acid sequence variants) or preparation by oligonucleotide-mediated (or site-directed) mutagenesis, PCR mutagenesis, and cassette mutagenesis of an earlier prepared variant or a non-variant version of the antibody. The present disclosure also provides isolated nucleic acid molecules encoding for antibodies or antigen binding fragment thereof, described herein, optionally operably linked to regulatory control sequences recognized by a host cell, vectors and host cells comprising the nucleic acids, and recombinant techniques for the production of the antibodies, which may comprise culturing the host cell so that the nucleic acid is expressed and, optionally, recovering the antibody from the host cell culture or culture medium. For recombinant production of an antibody or antigen binding fragment thereof, the nucleic acid molecule encoding it can be isolated and inserted into a replicable vector for further cloning (amplification of the DNA) or for expression. Accordingly provided herein are isolated antibody or antigen binding fragment thereof. In some embodiments, the antibodies or the present disclosure or antigen binding fragment thereof can be recombinant antibody. The term “recombinant antibody” refers to an antibody that is expressed from a cell or cell line transfected with an expression vector (or possibly more than one expression vector, typically two expression vectors) comprising the coding sequence of the antibody, where said coding sequence is not naturally associated with the cell. In one embodiment, a recombinant antibody has a glycosylation pattern that is different than the glycosylation pattern of an antibody having the same sequence if it were to exist in nature. In one embodiment, a recombinant antibody is expressed in a mammalian host cell which is not a human host cell. Notably, individual mammalian host cells have unique glycosylation patterns

[3024] In some embodiments, the antibodies or antigen binding fragment thereof of the present disclosure are isolated. With regards to the an isolated antibody polypeptide or an antigen binding fragment polypeptide; “isolated” is referred to when the polypeptide is separated from at least some of the components of the cell (e.g., host cell) in which it was produced. Where a polypeptide is secreted by a host cell after expression, physically separating the supernatant containing the polypeptide from the host cell that produced it is considered to be “isolating” the polypeptide. The term “isolated” refers to a protein (e.g., an antibody) that is substantially free of other cellular material and/or chemicals. In one embodiment, an isolated antibody is substantially free of other proteins from the same species. In one embodiment, an isolated antibody is expressed by a cell from a different species and is substantially free of other proteins from the difference species. A protein may be rendered substantially free of naturally associated components (or components associated with the cellular expression system used to produce the antibody) by isolation, using protein purification techniques well known in the art.

[3025] In some embodiments, the antibody or antigen binding fragment thereof disclosed herein is produced in a cell-free system. Nonlimiting exemplary cell-free systems are described, for example, in Sitaraman et al., Methods Mol. Biol. 498: 229-44 (2009); Spirin, Trends Biotechnol. 22: 538-45 (2004); Endo et al., Biotechnol. Adv. 21: 695-713 (2003). For such purposes the nucleic acids encoding the polypeptide must be modified to allow in vitro transcription to produce mRNA and to allow cell-free translation of the mRNA in the particular cell-free system being utilized (eukaryotic such as a mammalian or yeast cell-free translation system or prokaryotic such as a bacterial cell-free translation system. Antibody polypeptides can also be produced by chemical synthesis (e.g., by the methods described in Solid Phase Peptide Synthesis, 2nd ed., 1984, The Pierce Chemical Co., Rockford, Ill.). Modifications to the protein can also be produced by chemical synthesis. In some embodiments, the antibodies or antigen binding fragment of the present disclosure is synthetic. The polypeptides of the present disclosure can be purified by isolation/purification methods for proteins generally known in the field of protein chemistry.

[3026] When sources other than hybridomas are used to obtain antibodies, it may be desirable to screen for sequences encoding immunoglobulins or immunoglobulin polypeptides with specific binding characteristics. One method for such screening is the use of phage display technology. Phage display is described in e.g., Dower et al., McCafferty et al., and Caton and Koprowski, Proc. Natl. Acad. Sci. USA, 87:6450-6454 (1990), each of which is incorporated herein by reference. In one embodiment using phage display technology, cDNA from an immunized transgenic mouse (e.g., total spleen cDNA) is isolated, the polymerase chain reaction is used to amplify a cDNA sequences that encode a portion of an immunoglobulin polypeptide, e.g., CDR regions, and the amplified sequences are inserted into a phage vector. cDNAs encoding peptides of interest, e.g., variable region peptides with desired binding characteristics are identified by standard techniques such as panning. The sequence of the amplified or cloned nucleic acid is then determined. Typically the sequence encoding an entire variable region of the immunoglobulin polypeptide is determined, however, it will sometimes be adequate to sequence only a portion of a variable region, for example, the CDR-encoding portion. Typically the portion sequenced will be at least 30 bases in length, more often based coding for at least about one-third or at least about one-half of the length of the variable region will be sequenced.

[3027] Sequencing can be carried out on clones isolated from a cDNA library, or, when PCR is used, after subcloning the amplified sequence or by direct PCR sequencing of the amplified segment. Sequencing is carried out using standard techniques (see, e.g., Sambrook et al. (1989) Molecular Cloning: A Laboratory Guide, Vols 1-3, Cold Spring Harbor Press, and Sanger, F. et al. (1977) Proc. Natl. Acad. Sci. USA 74: 5463-5467, which is incorporated herein by reference). By comparing the sequence of the cloned nucleic acid with published sequences of human immunoglobulin genes and cDNAs, one of skill will readily be able to determine, depending on the region sequenced, (i) the germline segment usage of the hybridoma immunoglobulin polypeptide (including the isotype of the heavy chain) and (ii) the sequence of the heavy and light chain variable regions, including sequences resulting from N-region addition and the process of somatic mutation. One source of immunoglobulin gene sequence information is the National Center for Biotechnology Information, National Library of Medicine, National Institutes of Health, Bethesda, Md.

### Selection and Transformation of Host Cells

[3028] In one aspect, provided herein is a host cell that comprises the isolated nucleic acids described above or a vector comprising said isolated nucleic acids described above. The vector can be a cloning vector or an expression vector. Suitable host cells for cloning or expressing the DNA in the vectors herein are the prokaryote, yeast, or higher eukaryote cells described above. Suitable prokaryotes for this purpose include eubacteria, such as Gram-negative or Gram-positive organisms, for example, Enterobacteriaceae such as Escherichia, e.g., E. coli, Enterobacter, Erwinia, Klebsiella, Proteus, Salmonella, e.g., Salmonella typhimurium, Serratia, e.g., Serratia marcescens, and Shigella, as well as Bacilli such as B. subtilis and B. licheniformis (e.g., B. licheniformis 41 P disclosed in DD 266,710 published Apr. 12, 1989), Pseudomonas such as P. aeruginosa, and Streptomyces. One preferred E. coli cloning host is E. coli 294 (ATCC 31,446), although other strains such as E. coli B, E. coli X1 776 (ATCC 31,537), and E. coli W3110 (ATCC 27,325) are suitable. These examples are illustrative rather than limiting.

[3029] In addition to prokaryotes, eukaryotic microbes such as filamentous fungi or yeast are suitable cloning or expression hosts for antibody-encoding vectors. Saccharomyces cerevisiae, or common baker's yeast, is the most commonly used among lower eukaryotic host microorganisms. However, a number of other genera, species, and strains are commonly available and useful herein, such as Schizosaccharomyces pombe; Kluyveromyces hosts such as, e.g., K. lactis, K. fragilis (ATCC 12,424), K. bulgaricus (ATCC 16,045), K. wickeramii (ATCC 24,178), K. waltii (ATCC 56,500), K. drosophilarum (ATCC 36,906), K. thermotolerans, and K. marxianus; yarrowia (EP 402,226); Pichia pastors (EP 183,070); Candida; Trichoderma reesia (EP 244,234); Neurospora crassa; Schwanniomyces such as Schwanniomyces occidentalis; and filamentous fungi such as, e.g., Neurospora, Penicillium, Tolypocladium, and Aspergillus hosts such as A. nidulans and A. niger.

[3030] Suitable host cells for the expression of glycosylated antibody are derived from multicellular organisms. Examples of invertebrate cells include plant and insect cells. Numerous baculoviral strains and variants and corresponding permissive insect host cells from hosts such as Spodoptera frugiperda (caterpillar), Aedes aegypti (mosquito), Aedes albopictus (mosquito), Drosophila melanogaster (fruitfly), and Bombyx mori have been identified. A variety of viral strains for transfection are publicly available, e.g., the L-1 variant of Autographa californica NPV and the Bm-5 strain of Bombyx mori NP7, and such viruses may be used as the virus herein according to the present invention, particularly for transfection of Spodoptera frugiperda cells.

[3031] Plant cell cultures of cotton, corn, potato, soybean, petunia, tomato, tobacco, lemna, and other plant cells can also be utilized as hosts. However, interest has been greatest in vertebrate cells, and propagation of vertebrate cells in culture (tissue culture) has become routine procedure. Examples of useful mammalian host cell lines are Chinese hamster ovary cells, including CHOKI cells (ATCC CCL61), DXB-11, DG-44, and Chinese hamster ovary cells/-DHFR (CHO, Urlaub et al., Proc. Natl. Acad. Sci. USA 77: 4216 (1980)); monkey kidney CV1 line transformed by SV40 (COS-7, ATCC CRL 1651); human embryonic kidney line (293 or 293 cells subcloned for growth in suspension culture, [Graham et al., J. Gen Viral. 36: 59 (1977)]; baby hamster kidney cells (BHK, ATCC CCL 10); mouse sertoli cells (TM4, Mather, Biol. Reprod. 23: 243-251 (1980)); monkey kidney cells (CVI ATCC CCL 70); African green monkey kidney cells (VER0-76, ATCC CRL-1587); human cervical carcinoma cells (HELA, ATCC CCL 2); canine kidney cells (MDCK, ATCC CCL 34); buffalo rat liver cells (BRL 3A, ATCC CRL 1442); human lung cells (W138, ATCC CCL 75); human liver cells (Hep G2, HB 8065); mouse mammary tumor (MMT 060562, ATCC CCL51); TRI cells (Mather et al., Annals N. Y Acad. Sci. 383: 44-68 (1982)); MRC 5 cells; FS4 cells; and a human hepatoma line (Hep G2). Host cells are transformed or transfected with the above-described expression or cloning vectors for antibody production and cultured in conventional nutrient media modified as appropriate for inducing promoters, selecting transformants, or amplifying the genes encoding the desired sequences. In addition, novel vectors and transfected cell lines with multiple copies of transcription units separated by a selective marker are particularly useful and preferred for the expression of antibodies, described herein.

[3032] For transfection of the expression vectors and production of the chimeric, humanized, or composite human antibodies described herein, the recipient cell line can be a myeloma cell. Myeloma cells can synthesize, assemble and secrete immunoglobulins encoded by transfected immunoglobulin nucleic acid sequences and possess the mechanism for glycosylation of the immunoglobulin. For example, in some embodiments, the recipient cell is the recombinant Ig-producing myeloma cell SP2/0 (ATCC #CRL 8287). SP2/0 cells produce only immunoglobulin encoded by the transfected genes. Myeloma cells can be grown in culture or in the peritoneal cavity of a mouse, where secreted immunoglobulin can be obtained from ascites fluid. Other suitable recipient cells include lymphoid cells such as B lymphocytes of human or non-human origin, hybridoma cells of human or non-human origin, or interspecies heterohybridoma cells. An expression vector carrying a chimeric, humanized, or composite human antibody construct or antibody polypeptide described herein can be introduced into an appropriate host cell by any of a variety of suitable means, including such biochemical means as transformation, transfection, conjugation, protoplast fusion, calcium phosphate-precipitation, and application with polycations such as diethylaminoethyl (DEAE) dextran, and such mechanical means as electroporation, direct microinjection, and microprojectile bombardment. Johnston et al., 240 Science 1538 (1988), as known to one of ordinary skill in the art.

[3033] Yeast provides certain advantages over bacteria for the production of immunoglobulin H and L chains. Yeasts carry out post-translational peptide modifications including glycosylation. A number of recombinant DNA strategies exist that utilize strong promoter sequences and high copy number plasmids which can be used for production of the desired proteins in yeast. Yeast recognizes leader sequences of cloned mammalian gene products and secretes peptides bearing leader sequences (i.e., pre-peptides). Hitzman et al., 11th Intl. Conf. Yeast, Genetics & Molec. Biol. (Montpelier, France, 1982). Yeast gene expression systems can be routinely evaluated for the levels of production, secretion and the stability of antibody polypeptide or antigen-binding fragment peptide thereof, and assembled chimeric, humanized, or composite human antibodies, fragments and regions thereof. Any of a series of yeast gene expression systems incorporating promoter and termination elements from the actively expressed genes coding for glycolytic enzymes produced in large quantities when yeasts are grown in media rich in glucose can be utilized. Known glycolytic genes can also provide very efficient transcription control signals. For example, the promoter and terminator signals of the phosphoglycerate kinase (PGK) gene can be utilized. A number of approaches can be taken for evaluating optimal expression plasmids for the expression of cloned immunoglobulin cDNAs in yeast.

[3034] Bacterial strains can also be utilized as hosts for the production of the antibody molecules or fragments thereof described herein, E. coli K12 strains such as E. coli W3110 (ATCC 27325), Bacillus species, enterobacteria such as Salmonella typhimurium or Serratia marcescens, and various Pseudomonas species can be used. Plasmid vectors containing replicon and control sequences which are derived from species compatible with a host cell are used in connection with these bacterial hosts. The vector carries a replication site, as well as specific genes which are capable of providing phenotypic selection in transformed cells. A number of approaches can be taken for evaluating the expression plasmids for the production of chimeric, humanized, or composite humanized antibodies and fragments thereof encoded by the cloned immunoglobulin cDNAs or CDRs in bacteria (see Glover, 1985; Ausubel, 1987, 1993; Sambrook, 1989; Colligan, 1992-1996).

[3035] Host mammalian cells can be grown in vitro or in vivo. Mammalian cells provide post-translational modifications to immunoglobulin protein molecules including leader peptide removal, folding and assembly of H and L chains, glycosylation of the antibody molecules, and secretion of functional antibody protein. Mammalian cells which can be useful as hosts for the production of antibody proteins, in addition to the cells of lymphoid origin described above, include cells of fibroblast origin, such as Vero (ATCC CRL 81) or CHO-K1 (ATCC CRL 61) cells. Exemplary eukaryotic cells that can be used to express polypeptides include, but are not limited to, COS cells, including COS 7 cells; 293 cells, including 293-6E cells; CHO cells, including CHO—S and DG44 cells; PER.C6® cells (Crucell); and NS0 cells. In some embodiments, a particular eukaryotic host cell is selected based on its ability to make desired post-translational modifications to the variable heavy chains and/or variable light chains. For example, in some embodiments, CHO cells produce polypeptides that have a higher level of sialylation than the same polypeptide produced in 293 cells.

[3036] In some embodiments, polypeptides of the antibodies or antigen-binding fragment thereof, disclosed herein can be produced in vivo in an animal that has been engineered or transfected with one or more nucleic acid molecules encoding the polypeptides, according to any suitable method. In some embodiments, an antibody or antigen-binding fragment thereof is produced in a cell-free system. Non-limiting exemplary cell-free systems are described, e.g., in Sitaraman et al., Methods Mol. Biol. 498: 229-44 (2009); Spirin, Trends Biotechnol. 22: 538-45 (2004); and Endo et al., Biotechnol. Adv. 21: 695-713 (2003).

[3037] Many vector systems are available for the expression of H and L chain nucleic acid sequence in mammalian cells (see Glover, 1985). Different approaches can be followed to obtain complete H2L2 antibodies. As discussed above, it is possible to co-express H and L chains in the same cells to achieve intracellular association and linkage of H and L chains into complete tetrameric H2L2 antibodies and/or antigen-binding fragment peptides. The co-expression can occur by using either the same or different plasmids in the same host. Genes for both H and L chains and/or CDR3 regions peptides can be placed into the same plasmid, which is then transfected into cells, thereby selecting directly for cells that express both chains. Alternatively, cells can be transfected first with a plasmid encoding one chain, for example the L chain, followed by transfection of the resulting cell line with an H chain plasmid containing a second selectable marker. Cell lines producing antigen-binding peptide fragments and/or H2L2 molecules via either route could be transfected with plasmids encoding additional copies of peptides, H, L, or H plus L chains in conjunction with additional selectable markers to generate cell lines with enhanced properties, such as higher production of assembled H2L2 antibody molecules or enhanced stability of the transfected cell lines.

[3038] Additionally, plants have emerged as a convenient, safe and economical alternative main-stream expression systems for recombinant antibody production, which are based on large scale culture of microbes or animal cells. Antibodies can be expressed in plant cell culture, or plants grown conventionally. The expression in plants may be systemic, limited to sub-cellular plastids, or limited to seeds (endosperms). Several plant-derived antibodies have reached advanced stages of development (see, e.g., Biolex, NC).

[3039] In some aspects, provided herein are methods and systems for the production of a humanized antibody, which is prepared by a process which comprises maintaining a host transformed with a first expression vector which encodes the light chain of the humanized antibody and with a second expression vector which encodes the heavy chain of the humanized antibody under such conditions that each chain is expressed and isolating the humanized antibody formed by assembly of the thus-expressed chains. The first and second expression vectors can be the same vector. Also provided herein are DNA sequences encoding the light chain or the heavy chain of the humanized antibody; an expression vector which incorporates a said DNA sequence; and a host transformed with a said expression vector. Generating a humanized antibody from the sequences and information provided herein can be practiced by those of ordinary skill in the art without undue experimentation. In one approach, there are four general steps employed to humanize a monoclonal antibody. These are: (1) determining the nucleotide and predicted amino acid sequence of the starting antibody light and heavy variable domains; (2) designing the humanized antibody, i.e., deciding which antibody framework region to use during the humanizing process; (3) the actual humanizing methodologies/techniques; and (4) the transfection and expression of the humanized antibody.

### Library-Derivation

[3040] Antibodies or antigen-binding fragment thereof of the present disclosure may be isolated by screening combinatorial libraries for antibodies with the desired activity or activities. (See, e.g., in Hoogenboom et al., Methods in Molecular Biology 178:1-37 (2001); McCafferty et al., Nature 348:552-554; Clackson et al., Nature 352: 624-628 (1991); Marks et al., J. Mol. Biol. 222: 581-597 (1992); Marks and Bradbury, Methods in Molecular Biology 248:161-175 (2003); Sidhu et al., J. Mol. Biol. 338(2): 299-310 (2004); Lee et al., J. Mol. Biol. 340(5): 1073-1093 (2004); Fellouse, Proc. Natl. Acad. Sci. USA 101(34): 12467-12472 (2004); and Lee et al., J. Immunol. Methods 284(1-2): 119-132 (2004)). Repertoires of VH and VL genes can be cloned separately (e.g., by PCR) and recombined randomly in libraries (e.g., phage libraries), and screened (See, e.g., Winter et al., Ann. Rev. Immunol., 12: 433-455 (1994)). Alternatively, the naive repertoire can be cloned (e.g., from human) to provide a single source of antibodies to a wide range of non-self and also self-antigens without any immunization (See, e.g., Griffiths et al., EMBO J, 12: 725-734 (1993). Alternatively, naive libraries can be synthetically made by cloning unrearranged V-gene segments from stem cells, and encoding the CDR3 regions using random primers or to rearrange the V-gene segments in vitro (See, e.g., Hoogenboom and Winter, J. Mol. Biol., 227: 381-388 (1992)). Antibodies or antibody fragments isolated from human antibody libraries are considered human antibodies or human antibody fragments herein.

### Fusion Proteins

[3041] In one aspect, provided herein is a fusion protein comprising an antibody or an antigen-binding fragment, disclosed herein. In some embodiments, fusion protein comprises one or more antibody or antigen-binding fragment thereof, disclosed herein, and an immunomodulator or toxin moiety. Methods of making antibody fusion proteins are known. Antibody fusion proteins comprising an interleukin-2 moiety are described by Boleti et al., Ann. Oneal. 6:945 (1995), Nicolet et al., Cancer Gene Ther. 2:161 (1995), Becker et al., Proc. Natl Acad. Sci. USA 93:7826 (1996), Hank et al., Clin. Cancer Res. 2:1951 (1996), and Hu et al., Cancer Res. 56:4998 (1996). In addition, Yang et al., Hum. Antibodies Hybridomas 6:129 (1995), describe a fusion protein that includes an F(ab′)2 fragment and a tumor necrosis factor alpha moiety.

[3042] Methods of making antibody-toxin fusion proteins in which a recombinant molecule comprises one or more antibody components and a toxin or chemotherapeutic agent also are known to those of skill in the art. For example, antibody-Pseudomonas exotoxin A fusion proteins have been described by Chaudhary et al., Nature 339:394 (1989), Brinkmann et al., Proc. Nat'l Acad. Sci. USA 88:8616 (1991), Batra et al., Proc. Natl Acad. Sci. USA 89:5867 (1992), Friedman et al., J. Immunol. 150:3054 (1993), Weis et al., Int. J. Can. 60:137 (1995), Fominaya et al., J. Biol. Chem. 271:10560 (1996), Kuan et al., Biochemistry 35:2872 (1996), and Schmidt et al., Int. J. Can. 65:538 (1996). Antibody-toxin fusion proteins containing a diphtheria toxin moiety have been described by Kreitman et al., Leukemia 7:553 (1993), Nicholls et al., J. Biol. Chem. 268:5302 (1993), Thompson et al., J. Biol. Chem. 270:28037 (1995), and Vallera et al., Blood 88:2342 (1996). Deonarain et al., Tumor Targeting 1:177 (1995), have described an antibody-toxin fusion protein having an RNase moiety, while Linardou et al., Cell Biophys. 24-25:243 (1994), produced an antibody-toxin fusion protein comprising a DNase I component. Gelonin was used as the toxin moiety in the antibody-toxin fusion protein of Wang et al., Abstracts of the 209th ACS National Meeting, Anaheim, Calif, Apr. 2-6, 1995, Part 1, BIOT005. As a further example, Dohlsten et al., Proc. Natl Acad. Sci. USA 91:8945 (1994), reported an antibody-toxin fusion protein comprising Staphylococcal enterotoxin-A.

[3043] Illustrative of toxins which are suitably employed in the preparation of such conjugates are ricin, abrin, ribonuclease, DNase I, Staphylococcal enterotoxin-A, pokeweed antiviral protein, gelonin, diphtheria toxin, Pseudomonas exotoxin, and Pseudomonas endotoxin. See, for example, Pastan et al., Cell 47:641 (1986), and Goldenberg, C A-A Cancer Journal for Clinicians 44:43 (1994). Other suitable toxins are known to those of skill in the art.

[3044] Antibodies or antigen-binding fragment thereof, disclosed herein, may also be used in ADEPT by conjugating the antibody to a prodrug-activating enzyme which converts a prodrug (e.g., a peptidyl chemotherapeutic agent, see, WO 81/01145) to an active anti-cancer drug. See, for example, WO 88/07378 and U.S. Pat. No. 4,975,278. The enzyme component of the immunoconjugate useful for ADEPT includes any enzyme capable of acting on a prodrug in such a way so as to convert it into its more active, cytotoxic form.

[3045] Enzymes that are useful in the method of this invention include, but are not limited to, alkaline phosphatase useful for converting phosphate-containing prodrugs into free drugs; arylsulfatase useful for converting sulfate-containing prodrugs into free drugs; cytosine deaminase useful for converting non-toxic 5-fluorocytosine into the anti-cancer drug, 5-fluorouracil; proteases, such as Serratia protease, thermolysin, subtilisin, carboxypeptidases and cathepsins (such as cathepsins B and L), that are useful for converting peptide-containing prodrugs into free drugs; D-alanylcarboxypeptidases, useful for converting prodrugs that contain D-amino acid substituents; carbohydrate-cleaving enzymes such as galactosidase and neuraminidase useful for converting glycosylated prodrugs into free drugs; lactamase useful for converting drugs derivatized with lactams into free drugs; and penicillin amidases, such as penicillin V amidase or penicillin G amidase, useful for converting drugs derivatized at their amine nitrogens with phenoxyacetyl or phenylacetyl groups, respectively, into free drugs. Alternatively, antibodies with enzymatic activity, also known in the art as abzymes, can be used to convert the prodrugs of the invention into free active drugs (See, e.g., Massey, Nature 328: 457-458 (1987)). Antibody-abzyme conjugates can be prepared as described herein for delivery of the abzyme to a tumor cell population.

[3046] The enzymes of this invention can be covalently bound to the antibodies by techniques well known in the art such as the use of the heterobifunctional crosslinking reagents discussed above. Alternatively, fusion proteins comprising at least the antigen-binding region of an antibody of the invention linked to at least a functionally active portion of an enzyme of the invention can be constructed using recombinant DNA techniques well known in the art (See, e.g., Neuberger et al., Nature 312: 604-608 (1984)).

### Chimeric Antigen Receptors

[3047] In one aspect, the disclosure herein, provides a chimeric antigen receptor comprising, an antigen-binding fragment, disclosed herein, a transmembrane domain, and an intracellular signaling domain. The term “chimeric Antigen Receptor” (CAR), “artificial T cell receptor”, “chimeric T cell receptor”, or “chimeric immunoreceptor” as used herein refers to an engineered receptor, which grafts an arbitrary specificity onto an immune effector cell. CARs typically have an extracellular domain (ectodomain), which comprises an antigen-binding domain, a transmembrane domain, and an intracellular (endodomain) domain. The term “signaling domain” refers to the functional portion of a protein which acts by transmitting information within the cell to regulate cellular activity via defined signaling pathways by generating second messengers or functioning as effectors by responding to such messengers.

[3048] An “intracellular signaling domain,” as the term is used herein, refers to an intracellular portion of a molecule. The intracellular signaling domain generates a signal that promotes an immune effector function of the CAR containing cell, e.g., a CART cell. Examples of immune effector function, e.g., in a CART cell, include cytolytic activity and helper activity, including the secretion of cytokines. In an embodiment, the intracellular signaling domain can comprise a primary intracellular signaling domain. Exemplary primary intracellular signaling domains include those derived from the molecules responsible for primary stimulation, or antigen dependent simulation. In an embodiment, the intracellular signaling domain can comprise a costimulatory intracellular domain. Exemplary costimulatory intracellular signaling domains include those derived from molecules responsible for costimulatory signals, or antigen independent stimulation. For example, in the case of a CART, a primary intracellular signaling domain can comprise a cytoplasmic sequence of a T cell receptor, and a costimulatory intracellular signaling domain can comprise cytoplasmic sequence from co-receptor or costimulatory molecule.

[3049] A primary intracellular signaling domain can comprise a signaling motif which is known as an immunoreceptor tyrosine-based activation motif or ITAM. Examples of ITAM-containing primary cytoplasmic signaling sequences include, but are not limited to, those derived from CD3 zeta, FcR gamma, FcR beta, CD3 gamma, CD3 delta, CD3 epsilon, CD5, CD22, CD79a, CD79b, and CD66d DAP10 and DAP12.

[3050] The term “zeta” or alternatively “zeta chain”, “CD3-zeta” or “TCR-zeta” is defined as the protein provided as GenBank Acc. No. BAG36664.1, or the equivalent residues from a non-human species, e.g., mouse, rodent, monkey, ape and the like, and a “zeta stimulatory domain” or alternatively a “CD3-zeta stimulatory domain” or a “TCR-zeta stimulatory domain” is defined as the amino acid residues from the cytoplasmic domain of the zeta chain that are sufficient to functionally transmit an initial signal necessary for T cell activation. In one aspect the cytoplasmic domain of zeta comprises residues 52 through 164 of GenBank Acc. No. BAG36664.1 or the equivalent residues from a non-human species, e.g., mouse, rodent, monkey, ape and the like, that are functional orthologs thereof.

[3051] The term “costimulatory molecule” refers to the cognate binding partner on a T cell that specifically binds with a costimulatory ligand, thereby mediating a costimulatory response by the T cell, such as, but not limited to, proliferation. Costimulatory molecules are cell surface molecules other than antigen receptors or their ligands that are required for an efficient immune response. Costimulatory molecules include, but are not limited to, an MHC class I molecule, BTLA and a Toll ligand receptor, as well as OX40, CD2, CD27, CD28, CD5, ICAM-1, LFA-1 (CD11a/CD18) and 4-1BB (CD137). A costimulatory intracellular signaling domain can be derived from the intracellular portion of a costimulatory molecule. A costimulatory molecule can be represented in the following protein families: TNF receptor proteins, Immunoglobulin-like proteins, cytokine receptors, integrins, signaling lymphocytic activation molecules (SLAM proteins), and activating NK cell receptors. Examples of such molecules include CD27, CD28, 4-1BB (CD137), OX40, GITR, CD30, CD40, ICOS, BAFFR, HVEM, lymphocyte function-associated antigen-1 (LFA-1), CD2, CD7, LIGHT, NKG2C, SLAMF7, NKp80, CD160, B7-H3, and a ligand that specifically binds with CD83, and the like. The intracellular signaling domain can comprise the entire intracellular portion, or the entire native intracellular signaling domain, of the molecule from which it is derived, or a functional fragment thereof.

[3052] In another aspect, the antigen binding fragment comprises a humanized antibody or antibody fragment. In one embodiment, the antigen binding fragment comprises one or more (e.g., one, two, or all three) light chain complementary determining region 1 (CDR-L1), light chain complementary determining region 2 (CDR-L2), and light chain complementary determining region 3 (CDR-L3) of an antibody described herein, and one or more (e.g., one, two, or all three) heavy chain complementary determining region 1 (CDR-H1), heavy chain complementary determining region 2 (CDR-H2), and heavy chain complementary determining region 3 (CDR-H3) of an antibody described herein. In one embodiment, the CDR-L1 comprises a sequence selected from any one of SEQ ID NOS: 814-1084. In one embodiment, the CDR-L2 comprises a sequence selected from any one of SEQ ID NOS: 1356-1626. In one embodiment, the CDR-L3 comprises a sequence selected from any one of SEQ ID NOS: 1898-2168. In one embodiment, the CDR-H1 comprises a sequence selected from any one of SEQ ID NOS: 543-813. In one embodiment, the CDR-H2 comprises a sequence selected from any one of SEQ ID NOS: 1085-1355. In one embodiment, the CDR-H3 comprises a sequence selected from any one of SEQ ID NOS: 1627-1897. In one embodiment, the antigen-binding fragment comprises a light chain variable region described herein and/or a heavy chain variable region described herein. In some embodiments, the light chain variable region comprises a sequence selected from any one of SEQ ID NOS: 272-542. In some embodiments, the heavy chain variable region comprises a sequence selected from any one of SEQ ID NOS: 1-271. In one embodiment, the antigen-binding fragment is a scFv comprising a light chain variable region and a heavy chain variable region of an amino acid sequence, e.g., a light chain variable region and heavy chain variable region described herein. In an embodiment, the antigen-binding fragment (e.g., an scFv) comprises: a light chain variable region comprising an amino acid sequence having at least one, two or three modifications (e.g., substitutions) but not more than 30, 20 or 10 modifications (e.g., substitutions) of an amino acid sequence of a light chain variable region provided herein, or a sequence with 85-99% (e.g., 90-99%, or 95-99%) identity to an amino acid sequence provided herein; and/or a heavy chain variable region comprising an amino acid sequence having at least one, two or three modifications (e.g., substitutions) but not more than 30, 20 or 10 modifications (e.g., substitutions) of an amino acid sequence of a heavy chain variable region provided herein, or a sequence with 85-99% (e.g., 90-99%, or 95-99%) identity to an amino acid sequence provided herein.

### Transmembrane Domain

[3053] With respect to the transmembrane domain, in various embodiments, a CAR can be designed to comprise a transmembrane domain that is attached to the extracellular domain of the CAR. A transmembrane domain can include one or more additional amino acids adjacent to the transmembrane region, e.g., one or more amino acid associated with the extracellular region of the protein from which the transmembrane was derived (e.g., 1, 2, 3, 4, 5, 6, 7, 8, 9, 10 up to 15 amino acids of the extracellular region) and/or one or more additional amino acids associated with the intracellular region of the protein from which the transmembrane protein is derived (e.g., 1, 2, 3, 4, 5, 6, 7, 8, 9, 10 up to 15 amino acids of the intracellular region). In one aspect, the transmembrane domain is one that is associated with one of the other domains of the CAR is used. In some instances, the transmembrane domain can be selected or modified by amino acid substitution to avoid binding of such domains to the transmembrane domains of the same or different surface membrane proteins, e.g., to minimize interactions with other members of the receptor complex. In one aspect, the transmembrane domain is capable of homodimerization with another CAR on the CART cell surface. In a different aspect, the amino acid sequence of the transmembrane domain may be modified or substituted so as to minimize interactions with the binding domains of the native binding partner present in the same CAR T.

[3054] The transmembrane domain may be derived either from a natural or from a recombinant source. Where the source is natural, the domain may be derived from any membrane-bound or transmembrane protein. In one aspect the transmembrane domain is capable of signaling to the intracellular domain(s) whenever the CAR has bound to a target. A transmembrane domain, for example, can include at least the transmembrane region(s) of e.g., the alpha, beta or zeta chain of the T-cell receptor, CD28, CD3 epsilon, CD45, CD4, CD5, CD8, CD9, CD16, CD22, CD33, CD37, CD64, CD80, CD86, CD134, CD137, CD154. In some instances, the transmembrane domain can be attached to the extracellular region of the CAR, e.g., the antigen-binding domain of the CAR, via a hinge, e.g., a hinge from a human protein. For example, in one embodiment, the hinge can be a human Ig (immunoglobulin) hinge, e.g., an IgG4 hinge, or a CD8a hinge. In one aspect, the hinge or spacer comprises an IgG4 hinge.

### Cytoplasmic Domain

[3055] The cytoplasmic domain or region of the CAR includes an intracellular signaling domain. An intracellular signaling domain is generally responsible for activation of at least one of the normal effector functions of the immune cell in which the CAR has been introduced. The term “effector function” refers to a specialized function of a cell. Effector function of a T cell, for example, may be cytolytic activity or helper activity including the secretion of cytokines. Thus the term “intracellular signaling domain” refers to the portion of a protein which transduces the effector function signal and directs the cell to perform a specialized function. While usually the entire intracellular signaling domain can be employed, in many cases it is not necessary to use the entire chain. To the extent that a truncated portion of the intracellular signaling domain is used, such truncated portion may be used in place of the intact chain as long as it transduces the effector function signal. The term intracellular signaling domain is thus meant to include any truncated portion of the intracellular signaling domain sufficient to transduce the effector function signal. Examples of intracellular signaling domains for use in the CAR of the invention include the cytoplasmic sequences of the T cell receptor (TCR) and co-receptors that act in concert to initiate signal transduction following antigen receptor engagement, as well as any derivative or variant of these sequences and any recombinant sequence that has the same functional capability.

[3056] It is known that signals generated through the TCR alone are insufficient for full activation of the T cell and that a secondary and/or costimulatory signal is also required. Thus, T cell activation can be said to be mediated by two distinct classes of cytoplasmic signaling sequences: those that initiate antigen-dependent primary activation through the TCR (primary intracellular signaling domains) and those that act in an antigen-independent manner to provide a secondary or costimulatory signal (secondary cytoplasmic signaling domain, e.g., a costimulatory domain). A primary signaling domain regulates primary activation of the TCR complex either in a stimulatory way, or in an inhibitory way. Primary intracellular signaling domains that act in a stimulatory manner may contain signaling motifs which are known as immunoreceptor tyrosine-based activation motifs or ITAMs.

[3057] Examples of ITAM containing primary intracellular signaling domains that are of particular use in the invention include those of TCR zeta, FcR gamma, FcR beta, CD3 gamma, CD3 delta, CD3 epsilon, CD5, CD22, CD79a, CD79b, and CD66d. In one embodiment, a CAR of the invention, e.g., a CAR comprises a intracellular signaling domain, e.g., a primary signaling domain, of CD3-zeta. In one embodiment, a primary signaling domain comprises a modified ITAM domain, e.g., a mutated ITAM domain which has altered (e.g., increased or decreased) activity as compared to the native ITAM domain. In one embodiment, a primary signaling domain comprises a modified ITAM-containing primary intracellular signaling domain, e.g., an optimized and/or truncated ITAM-containing primary intracellular signaling domain. In an embodiment, a primary signaling domain comprises one, two, three, four or more ITAM motifs.

[3058] The intracellular signaling domain of the CAR can comprise the CD3-zeta signaling domain by itself or it can be combined with any other desired intracellular signaling domain(s) useful in the context of a CAR of the invention. For example, the intracellular signaling domain of the CAR can comprise a CD3 zeta chain portion and a costimulatory signaling domain. The costimulatory signaling domain refers to a portion of the CAR comprising the intracellular domain of a costimulatory molecule. A costimulatory molecule is a cell surface molecule other than an antigen receptor or its ligands that is required for an efficient response of lymphocytes to an antigen. Examples of such molecules include CD27, CD28, 4-1BB (CD137), OX40, CD30, CD40, PD-1, ICOS, lymphocyte function-associated antigen-1 (LFA-1), CD2, CD7, LIGHT, NKG2C, B7-H3, and a ligand that specifically binds with CD83, and the like. For example, CD27 costimulation has been demonstrated to enhance expansion, effector function, and survival of human CART cells in vitro and augments human T cell persistence and antitumor activity in vivo (Song et al. Blood. 2012; 119(3):696-706). The intracellular signaling sequences within the cytoplasmic portion of a CAR of the invention may be linked to each other in a random or specified order. Optionally, a short oligo- or polypeptide linker, for example, between 2 and 10 amino acids (e.g., 2, 3, 4, 5, 6, 7, 8, 9, or 10 amino acids) in length may form the linkage between intracellular signaling sequence. In one embodiment, a glycine-serine doublet can be used as a suitable linker. In one embodiment, a single amino acid, e.g., an alanine, a glycine, can be used as a suitable linker.

[3059] In one aspect, the intracellular signaling domain is designed to comprise two or more, e.g., 2, 3, 4, 5, or more, costimulatory signaling domains. In an embodiment, the two or more, e.g., 2, 3, 4, 5, or more, costimulatory signaling domains, are separated by a linker molecule, e.g., a linker molecule described herein. In one embodiment, the intracellular signaling domain comprises two costimulatory signaling domains. In some embodiments, the linker molecule is a glycine residue. In some embodiments, the linker is an alanine residue. In some embodiments, CAR does not actually recognize the entire antigen; instead it binds to only a portion of the antigen's surface, an area called the antigenic determinant or epitope. In some embodiments, a CAR described herein include (including functional portions and functional variants thereof) glycosylated, amidated, carboxylated, phosphorylated, esterified, N-acylated, cyclized via, e.g., a disulfide bridge, or converted into an acid addition salt and/or optionally dimerized or polymerized, or conjugated.

### T Cell Receptor Fusion Proteins (TFP)

[3060] As used herein, a “T-cell receptor (TCR) fusion protein” or “TFP” includes a recombinant polypeptide derived from the various polypeptides comprising the TCR that is generally capable of i) binding to a surface antigen on target cells and ii) interacting with other polypeptide components of the intact TCR complex, typically when co-located in or on the surface of a T-cell. Non-limiting examples of TFPs are illustrated in FIGS. 9-12.

[3061] In one aspect provided herein is an isolated TFP molecule that comprises a human or humanized anti-cancer antigen (anti-Cag) binding domain, a TCR extracellular domain, a transmembrane domain, and an intracellular signaling domain. In some embodiments, the TFP molecule is capable of functionally interacting with an endogenous TCR complex and/or at least one endogenous TCR polypeptide. In some instances, the anti-CAg binding domain is a scFv or a VH domain. In some instances, the anti-CAg binding domain comprises a heavy chain with 95-100% identity to an amino acid sequence of SEQ ID NOs: 1-271, a functional fragment thereof, or an amino acid sequence thereof having at least one but not more than 30 modifications. In some instances, the anti-CAg binding domain comprises a light chain with 95-100% identity to an amino acid sequence of SEQ ID NOs: 272-542, a functional fragment thereof, or an amino acid sequence thereof having at least one but not more than 30 modifications. In some instances, the isolated TFP molecule comprises a TCR extracellular domain that comprises an extracellular domain or portion thereof of a protein selected from the group consisting of a TCR alpha chain, a TCR beta chain, a CD3 epsilon TCR subunit, a CD3 gamma TCR subunit, a CD3 delta TCR subunit, functional fragments thereof, and amino acid sequences thereof having at least one but not more than 20 modifications. In some instances, the anti-CAg binding domain is connected to the TCR extracellular domain by a linker sequence. In some instances, the linker region comprises (G4S)n, wherein n=1 to 4.

[3062] In one aspect, provided herein is a vector that comprises a nucleic acid molecule encoding a TFP provided herein. In some instances, the vector is selected from the group consisting of a DNA, a RNA, a plasmid, a lentivirus vector, adenoviral vector, a Rous sarcoma viral (RSV) vector, or a retrovirus vector. In some instances, the vector further comprises a promoter. In some instances, the vector is an in vitro transcribed vector. In some instances, a nucleic acid sequence in the vector further comprises a poly(A) tail. In some instances, a nucleic acid sequence in the vector further comprises a 3′UTR.

[3063] In one aspect, provided herein is a cell that comprises a vector provided herein. In some instances, the cell is a human T-cell. In some instances, the T-cell is a CD8+ or CD4+ T-cell. In some instances, the cell further comprises a nucleic acid encoding an inhibitory molecule that comprises a first polypeptide that comprises at least a portion of an inhibitory molecule, associated with a second polypeptide that comprises a positive signal from an intracellular signaling domain. In some instances, the inhibitory molecule comprise first polypeptide that comprises at least a portion of PD1 and a second polypeptide comprising a costimulatory domain and primary signaling domain.

[3064] In one aspect, provided herein is a human CD8+ or CD4+ T-cell that comprises at least two TFP molecules, the TFP molecules comprising a human or humanized anti-CAg binding domain, a TCR extracellular domain, a transmembrane domain, and an intracellular domain, wherein the TFP molecule is capable of functionally interacting with an endogenous TCR complex and/or at least one endogenous TCR polypeptide in, at and/or on the surface of the human CD8+ or CD4+ T-cell.

[3065] In one aspect, provided herein is a protein complex that comprises: a TFP molecule comprising a human or humanized anti-CAg binding domain, a TCR extracellular domain, a transmembrane domain, and an intracellular domain; and at least one endogenous TCR complex.

[3066] In some instances, the TCR comprises an extracellular domain or portion thereof of a protein selected from the group consisting of TCR alpha chain, a TCR beta chain, a CD3 epsilon TCR subunit, a CD3 gamma TCR subunit, and a CD3 delta TCR subunit. In some instances, the anti-CAg binding domain is connected to the TCR extracellular domain by a linker sequence. In some instances, the linker region comprises (G4S)n, wherein n=1 to 4. In some instances, the disease associated with the cancer antigen expression is selected from the group consisting of a proliferative disease, a cancer, a malignancy, myelodysplasia, a myelodysplastic syndrome, a preleukemia, a non-cancer related indication associated with expression of the cancer antigen. In some instances, the disease is a cancer or a metastasis thereof. In some instances, the cells expressing a TFP molecule are administered in combination with an agent that increases the efficacy of a cell expressing a TFP molecule.

[3067] In one aspect, an isolated nucleic acid molecule provided herein, an isolated polypeptide molecule provided herein, an isolated TFP provided herein, a complex provided herein, a vector provided herein, or a cell provided herein, is for use as a medicament.

[3068] The term “stimulation” refers to a primary response induced by binding of a stimulatory domain or stimulatory molecule (e.g., a TCR/CD3 complex) with its cognate ligand thereby mediating a signal transduction event, such as, but not limited to, signal transduction via the TCR/CD3 complex. Stimulation can mediate altered expression of certain molecules, and/or reorganization of cytoskeletal structures, and the like. Methods of making, expressing and isolating TFPs are known in the art in, for example, U.S. Pre-Grant Publication No. 20170166622 A1, which methods are hereby incorporated by reference.

### Antigen-Binding Domain

[3069] In one aspect, the TFP of the invention comprises a target-specific binding element otherwise referred to as an antigen-binding domain. The choice of moiety depends upon the type and number of target antigen that define the surface of a target cell. For example, the antigen-binding domain may be chosen to recognize a target antigen that acts as a cell surface marker on target cells associated with a particular disease state. Thus examples of cell surface markers that may act as target antigens for the antigen-binding domain in a TFP of the invention include those associated with cancerous diseases (e.g., malignant diseases).

[3070] In one aspect, the TFP-mediated T-cell response can be directed to an antigen of interest by way of engineering an antigen-binding domain into the TFP that specifically binds a desired antigen. In one aspect, the portion of the TFP comprising the antigen-binding domain comprises an antigen-binding domain that targets a cancer antigen (CAg). In one aspect, the antigen-binding domain targets human CAg. The antigen-binding domain can be any domain that binds to the CAg including but not limited to a monoclonal antibody, a polyclonal antibody, a recombinant antibody, a human antibody, a humanized antibody, and a functional fragment thereof, including but not limited to a single-domain antibody such as a heavy chain variable domain (VH), a light chain variable domain (VL) and a variable domain (VHH) of a camelid derived nanobody, and to an alternative scaffold known in the art to function as antigen-binding domain, such as a recombinant fibronectin domain, anticalin, DARPIN, and the like. Likewise a natural or synthetic ligand specifically recognizing and binding the target CAg can be used as antigen-binding domain for the TFP. In some instances, it is beneficial for the antigen-binding domain to be derived from the same species in which the TFP will ultimately be used in. For example, for use in humans, it may be beneficial for the antigen-binding domain of the TFP to comprise human or humanized residues for the antigen-binding domain of an antibody or antibody fragment.

[3071] The portion of the TFP composition of the invention comprising an antibody or antibody fragment thereof may exist in a variety of forms where the antigen-binding domain is expressed as part of a contiguous polypeptide chain including, for example, a single domain antibody fragment (sdAb), a single chain antibody (scFv) derived from a murine, humanized or human antibody (Harlow et al., 1999, In: Using Antibodies: A Laboratory Manual, Cold Spring Harbor Laboratory Press, N.Y.; Harlow et al., 1989, In: Antibodies: A Laboratory Manual, Cold Spring Harbor, N.Y.; Houston et al., 1988, Proc. Natl. Acad. Sci. USA 85:5879-5883; Bird et al., 1988, Science 242:423-426). In one aspect, the antigen-binding domain of a TFP composition of the invention comprises an antibody fragment. In a further aspect, the TFP comprises an antibody fragment that comprises a scFv or a sdAb.

[3072] In another aspect, the antigen-binding domain comprises a humanized antibody or antigen-binding domain. In one embodiment, the antigen-binding domain comprises one or more (e.g., one, two, or all three) light chain complementary determining region 1 (CDR-L1), light chain complementary determining region 2 (CDR-L2), and light chain complementary determining region 3 (CDR-L3) of an antibody described herein, and one or more (e.g., one, two, or all three) heavy chain complementary determining region 1 (CDR-H1), heavy chain complementary determining region 2 (CDR-H2), and heavy chain complementary determining region 3 (CDR-H3) of an antibody described herein. In some embodiments, the CDR-H1 comprises a sequence selected from any one of SEQ ID NOs: 543-813. In some embodiments, the CDR-H2 comprises a sequence selected from any one of SEQ ID NOs: 1085-1355. In some embodiments the CDR-H3 comprises a sequence selected from any one of SEQ ID NOS: 1627-1897. In some embodiments, the CDR-L1 comprises a sequence selected from any one of SEQ ID NOs: 814-1084. In some embodiments, the CDR-L2 comprises a sequence selected from any one of SEQ ID NOs: 1356-1626. In some embodiments, the CDR-L3 comprises a sequence selected from any one of SEQ ID NOs: 1898-2168. In one embodiment, the antigen-binding domain comprises a heavy chain variable region described herein and/or a light chain variable region described herein. In some embodiments, the heavy chain variable region comprises a sequence selected from any one of SEQ ID NOs: 1-271. In some embodiments, the light chain variable region comprises a sequence selected from any one of SEQ ID NOs: 272-542.

[3073] In some embodiments, the antigen-binding domain is a scFv comprising a heavy chain variable region and a light chain variable region of an amino acid sequence, e.g., a heavy chain variable region and light chain variable region described herein. In some embodiments, the antigen-binding domain (e.g., an scFv) comprises a heavy chain variable region comprising an amino acid sequence having at least one, two or three modifications (e.g., substitutions) but not more than 30, 20 or 10 modifications (e.g., substitutions) of an amino acid sequence of a heavy chain variable region provided herein, or a sequence with 85-99% (e.g., 90-99%, or 95-99%) identity to an amino acid sequence provided herein; and/or a light chain variable region comprising an amino acid sequence having at least one, two or three modifications (e.g., substitutions) but not more than 30, 20 or 10 modifications (e.g., substitutions) of an amino acid sequence of a light chain variable region provided herein, or a sequence with 85-99% (e.g., 90-99%, or 95-99%) identity to an amino acid sequence provided herein; and/or

[3074] The term “stimulatory molecule” or “stimulatory domain” refers to a molecule or portion thereof expressed by a T-cell that provides the primary cytoplasmic signaling sequence(s) that regulate primary activation of the TCR complex in a stimulatory way for at least some aspect of the T-cell signaling pathway. In one aspect, the primary signal is initiated by, for instance, binding of a TCR/CD3 complex with an MHC molecule loaded with peptide, and which leads to mediation of a T-cell response, including, but not limited to, proliferation, activation, differentiation, and the like. A primary cytoplasmic signaling sequence (also referred to as a “primary signaling domain”) that acts in a stimulatory manner may contain a signaling motif which is known as immunoreceptor tyrosine-based activation motif (ITAM). Examples of an ITAM containing primary cytoplasmic signaling sequence that is of particular use in the invention includes, but is not limited to, those derived from TCR zeta, FcR gamma, FcR beta, CD3 gamma, CD3 delta, CD3 epsilon, CD5, CD22, CD79a, CD79b, CD278 (also known as “ICOS”) and CD66d.

[3075] The term “antigen presenting cell” or “APC” refers to an immune system cell such as an accessory cell (e.g., a B-cell, a dendritic cell, and the like) that displays a foreign antigen complexed with major histocompatibility complexes (MHC's) on its surface. T-cells may recognize these complexes using their T-cell receptors (TCRs). APCs process antigens and present them to T-cells.

[3076] An “intracellular signaling domain,” as the term is used herein, refers to an intracellular portion of a molecule. The intracellular signaling domain generates a signal that promotes an immune effector function of the TFP containing cell, e.g., a TFP-expressing T-cell. Examples of immune effector function, e.g., in a TFP-expressing T-cell, include cytolytic activity and T helper cell activity, including the secretion of cytokines. In an embodiment, the intracellular signaling domain can comprise a primary intracellular signaling domain. Exemplary primary intracellular signaling domains include those derived from the molecules responsible for primary stimulation, or antigen dependent simulation. In an embodiment, the intracellular signaling domain can comprise a costimulatory intracellular domain. Exemplary costimulatory intracellular signaling domains include those derived from molecules responsible for costimulatory signals, or antigen independent stimulation.

[3077] A primary intracellular signaling domain can comprise an ITAM (“immunoreceptor tyrosine-based activation motif”). Examples of ITAM containing primary cytoplasmic signaling sequences include, but are not limited to, those derived from CD3 zeta, FcR gamma, FcR beta, CD3 gamma, CD3 delta, CD3 epsilon, CD5, CD22, CD79a, CD79b, and CD66d DAP10 and DAP12.

[3078] The term “costimulatory molecule” refers to the cognate binding partner on a T-cell that specifically binds with a costimulatory ligand, thereby mediating a costimulatory response by the T-cell, such as, but not limited to, proliferation. Costimulatory molecules are cell surface molecules other than antigen receptors or their ligands that are required for an efficient immune response. Costimulatory molecules include, but are not limited to an MHC class 1 molecule, BTLA and a Toll ligand receptor, as well as OX40, CD2, CD27, CD28, CDS, ICAM-1, LFA-1 (CD11a/CD18) and 4-1BB (CD137). A costimulatory intracellular signaling domain can be the intracellular portion of a costimulatory molecule. A costimulatory molecule can be represented in the following protein families: TNF receptor proteins, Immunoglobulin-like proteins, cytokine receptors, integrins, signaling lymphocytic activation molecules (SLAM proteins), and activating NK cell receptors. Examples of such molecules include CD27, CD28, 4-1BB (CD137), OX40, GITR, CD30, CD40, ICOS, BAFFR, HVEM, lymphocyte function-associated antigen-1 (LFA-1), CD2, CD7, LIGHT, NKG2C, SLAMF7, NKp80, CD160, B7-H3, and a ligand that specifically binds with CD83, and the like. The intracellular signaling domain can comprise the entire intracellular portion, or the entire native intracellular signaling domain, of the molecule from which it is derived, or a functional fragment thereof. The term “4-1BB” refers to a member of the TNFR superfamily with an amino acid sequence provided as GenBank Acc. No. AAA62478.2, or the equivalent residues from a non-human species, e.g., mouse, rodent, monkey, ape and the like; and a “4-1BB costimulatory domain” is defined as amino acid residues 214-255 of GenBank Acc. No. AAA62478.2, or the equivalent residues from a non-human species, e.g., mouse, rodent, monkey, ape and the like.

### Extracellular Domain

[3079] The extracellular domain may be derived either from a natural or from a recombinant source. Where the source is natural, the domain may be derived from any protein, but in particular a membrane-bound or transmembrane protein. In one aspect the extracellular domain is capable of associating with the transmembrane domain. An extracellular domain of particular use in this invention may include at least the extracellular region(s) of e.g., the alpha, beta or zeta chain of the T-cell receptor, or CD3 epsilon, CD3 gamma, or CD3 delta, or in alternative embodiments, CD28, CD45, CD4, CD5, CD8, CD9, CD16, CD22, CD33, CD37, CD64, CD80, CD86, CD134, CD137, CD154.

### Transmembrane Domain

[3080] In general, a TFP sequence contains an extracellular domain and a transmembrane domain encoded by a single genomic sequence. In alternative embodiments, a TFP can be designed to comprise a transmembrane domain that is heterologous to the extracellular domain of the TFP. A transmembrane domain can include one or more additional amino acids adjacent to the transmembrane region, e.g., one or more amino acid associated with the extracellular region of the protein from which the transmembrane was derived (e.g., 1, 2, 3, 4, 5, 6, 7, 8, 9, 10 or up to 15 amino acids of the extracellular region) and/or one or more additional amino acids associated with the intracellular region of the protein from which the transmembrane protein is derived (e.g., 1, 2, 3, 4, 5, 6, 7, 8, 9, 10 or up to 15 amino acids of the intracellular region). In one aspect, the transmembrane domain is one that is associated with one of the other domains of the TFP is used. In some instances, the transmembrane domain can be selected or modified by amino acid substitution to avoid binding of such domains to the transmembrane domains of the same or different surface membrane proteins, e.g., to minimize interactions with other members of the receptor complex. In one aspect, the transmembrane domain is capable of homodimerization with another TFP on the TFP-T-cell surface. In a different aspect the amino acid sequence of the transmembrane domain may be modified or substituted so as to minimize interactions with the binding domains of the native binding partner present in the same TFP.

[3081] The transmembrane domain may be derived either from a natural or from a recombinant source. Where the source is natural, the domain may be derived from any membrane-bound or transmembrane protein. In one aspect the transmembrane domain is capable of signaling to the intracellular domain(s) whenever the TFP has bound to a target. A transmembrane domain of particular use in this invention may include at least the transmembrane region(s) of e.g., the alpha, beta or zeta chain of the T-cell receptor, CD28, CD3 epsilon, CD45, CD4, CD5, CD8, CD9, CD16, CD22, CD33, CD37, CD64, CD80, CD86, CD134, CD137, CD154. In some instances, the transmembrane domain can be attached to the extracellular region of the TFP, e.g., the antigen-binding domain of the TFP, via a hinge, e.g., a hinge from a human protein. For example, in one embodiment, the hinge can be a human immunoglobulin (Ig) hinge, e.g., an IgG4 hinge, or a CD8a hinge.

### Linkers

[3082] Optionally, a linker may form the linkage between the transmembrane domain and the cytoplasmic region of the TFP. For examples of linker orientation and size see, e.g., Hollinger et al. 1993 Proc Natl Acad. Sci. U.S.A. 90:6444-6448, U.S. Patent Application Publication Nos. 2005/0100543, 2005/0175606, 2007/0014794, and PCT publication Nos. WO2006/020258 and WO2007/024715, is incorporated herein by reference. For example, a short oligo- or polypeptide linker, between 2 and 10 amino acids in length may form the linkage between the transmembrane domain and the cytoplasmic region of the TFP. In some instances, a linker can be about 10, 11, 12, 13, 14, 15 or greater than 15 residues between VL and VH regions. The linker sequence may comprise any naturally occurring amino acid. Variation in the linker length may retain or enhance activity, giving rise to superior efficacy in activity studies. In one aspect, a linker comprises amino acids glycine and serine with an optimized length and/or amino acid composition. The linker length can greatly affect how the variable regions of a polypeptide fold and interact. In fact, if a short polypeptide linker is employed (e.g., between 5-10 amino acids) intra-chain folding is prevented. Inter-chain folding is also required to bring the two variable regions together to form a functional epitope binding site. In some embodiments, the linker sequence comprises sets of glycine and serine repeats such as (Gly4Ser)n, where n is a positive integer equal to or greater than 1. In some instances, the linker sequence comprises a long linker (LL) sequence. In some instances, the long linker sequence comprises (G4S)n, wherein n=2 to 4. In some instances, the linker sequence comprises a short linker (SL) sequence. In some instances, the short linker sequence comprises (G4S)n, wherein n=1 to 3. A glycine-serine doublet provides a particularly suitable linker. For example, in one aspect, the linker comprises the amino acid sequence of GGGGSGGGGS. In some embodiments, the linker is encoded by a nucleotide sequence of GGTGGCGGAGGTTCTGGAGGTGGAGGTTCC. In one embodiment, the linker can be (Gly4Ser)4 or (Gly4Ser)3.

### Purification

[3083] The term “isolated” means altered or removed from the natural state. For example, a nucleic acid or a polypeptide naturally present in a living animal is not “isolated,” but the same nucleic acid or polypeptide partially or completely separated from the coexisting materials of its natural state is “isolated.” An isolated nucleic acid or polypeptide can exist in substantially purified form, or can exist in a non-native environment such as, for example, a host cell. An isolated polypeptide is one that has been separated and/or recovered from a component of its natural environment. Contaminant components of its natural environment are materials that would interfere with diagnostic or therapeutic uses of the polypeptide, and may include enzymes, hormones, and other proteinaceous or non-proteinaceous components. In preferred embodiments, the polypeptide is purified: (1) to greater than 95% by weight of polypeptide as determined by the Lowry method, and most preferably more than 99% by weight; (2) to a degree sufficient to obtain at least 15 residues of N-terminal or internal amino acid sequence by use of a spinning cup sequenator; or (3) to homogeneity as shown by SDS-PAGE under reducing or non-reducing conditions and using Coomassie blue or, preferably, silver staining. Isolated antibody includes the polypeptide in situ within recombinant cells since at least one component of the polypeptide's natural environment will not be present. Ordinarily, however, isolated polypeptide will be prepared by at least one purification step.

[3084] In one aspect, disclosed herein is a purified antibody or antigen-binding fragment as provided herein. Once expressed, the whole antibodies, their dimers, individual light and heavy chains, or other immunoglobulin forms of the present invention can be recovered and purified by known techniques, e.g., immunoabsorption or immunoaffinity chromatography, chromatographic methods such as HPLC (high performance liquid chromatography), ammonium sulfate precipitation, gel electrophoresis, or any combination of these. See generally, Scopes, PROTEIN PURIF. (Springer-Verlag, NY, 1982).

[3085] Substantially pure immunoglobulins of at least about 90% to 95% homogeneity are advantageous, as are those with 98% to 99% or more homogeneity, particularly for pharmaceutical uses. When using recombinant techniques, the antibody can be produced intracellularly, in the periplasmic space, or directly secreted into the medium, including from microbial cultures. If the antibody is produced intracellularly, as a first step, the particulate debris, either host cells or lysed fragments, is removed, for example, by centrifugation or ultrafiltration. Better et al. Science 240: 1041-1043 (1988); ICSU Short Reports 10: 105 (1990); and Proc. Natl. Acad. Sci. USA 90: 457-461 (1993) describe a procedure for isolating antibodies which are secreted to the periplasmic space of E. coli. (See also, [Carter et al., Bio/Technology 10: 163-167 (1992)].

[3086] The antibody composition prepared from microbial or mammalian cells can be purified using, for example, hydroxylapatite chromatography cation or avian exchange chromatography, and affinity chromatography, with affinity chromatography being the preferred purification technique. The suitability of protein A as an affinity ligand depends on the species and isotype of any immunoglobulin Fc domain that is present in the antibody. Protein A can be used to purify antibodies that are based on human γ1, γ2, or γ4 heavy chains (Lindmark et al., J. Immunol. Meth. 62: 1-13 (1983)). Protein G is recommended for all mouse isotypes and for human γ3 (Guss et al., EMBO J. 5: 15671575 (1986)). The matrix to which the affinity ligand is attached is most often agarose, but other matrices are available. Mechanically stable matrices such as controlled pore glass or poly(styrenedivinyl)benzene allow for faster flow rates and shorter processing times than can be achieved with agarose. Where the antibody comprises a CH 3 domain, the Bakerbond ABX™ resin (J. T. Baker, Phillipsburg, N.J.) is useful for purification. Other techniques for protein purification such as fractionation on an ion-exchange column, ethanol precipitation, Reverse Phase HPLC, chromatography on silica, chromatography on heparin SEPHAROSE™ chromatography on an anion or cation exchange resin (such as a polyaspartic acid column), chromatofocusing, SDS-PAGE, and ammonium sulfate precipitation are also available depending on the antibody to be recovered. Once purified, partially or to homogeneity as desired, a humanized or composite human antibody can then be used therapeutically or in developing and performing assay procedures, immunofluorescent staining, and the like. See generally, Vols. I & II Immunol. Meth. (Lefkovits & Pernis, eds., Acad. Press, NY, 1979 and 1981).

[3087] Functional activities of an antibody or antigen-binding fragment disclosed herein include, but are not limited to, biological activity and ability to bind to a cancer cell antigen. Additionally, a polypeptide having functional activity means the polypeptide exhibits activity similar, but not necessarily identical to, an activity of an antibody described herein, including mature forms, as measured in a particular assay, such as, for example, a biological assay, with or without dose dependency. In the case where dose dependency does exist, it need not be identical to that of the antibodies of the disclosure, but rather substantially similar to the dose-dependence in a given activity as compared to the antibodies set forth herein (i.e., the candidate polypeptide will exhibit greater activity, or not more than about 25-fold less, about 10-fold less, or about 3-fold less activity relative to the antibodies described herein).

### Methods of Engineering Antibodies

[3088] As discussed above, antibodies having VH and VL sequences disclosed herein can be used to create new antibodies, respectively, by modifying the VH and/or VL sequences, or the constant regions attached thereto. Thus, in another aspect according to at least some embodiments of the present disclosure, the structural features of an antibody disclosed herein according to at least some embodiments of the disclosure, are used to create structurally related antibodies that retain at least one functional property of the parent antibodies according to at least some embodiments of the disclosure herein, such as binding to human cancer cell antigen, respectively. For example, one or more CDR regions of one antibody disclosed herein or mutations thereof, can be combined recombinantly with known framework regions and/or other CDRs to create additional, recombinantly-engineered, antibodies according to at least some embodiments of the disclosure, as discussed above. Other types of modifications include those described in the previous section. The starting material for the engineering method is one or more of the VH and/or VL sequences provided herein, or one or more CDR regions thereof, or one or more of the CDR3 region sequences provided herein. To create the engineered antibody, it is not necessary to actually prepare (i.e., express as a protein) an antibody having one or more of the VH and/or VL sequences provided herein, or one or more CDR regions thereof. Rather, the information contained in the sequences is used as the starting material to create a “second generation” sequences derived from the original sequences and then the “second generation” sequences is prepared and expressed as a protein.

[3089] Standard molecular biology techniques can be used to prepare and express altered antibody sequence. Preferably, the antibody encoded by the altered antibody sequences is one that retains one, some or all of the functional properties of the antibodies disclosed herein, respectively, produced by methods and with sequences provided herein, which functional properties include, for example, binding to a cancer cell antigen with a specific K_{D} level or less and/or modulating immune stimulation and/or selectively binding to desired target cells such as for example, that express cancer associated antigen.

[3090] The functional properties of the altered antibodies can be assessed using standard assays available in the art and/or described herein. In some embodiments, mutations can be introduced randomly or selectively along all or part of an antibody coding sequence disclosed herein and the resulting modified antibodies can be screened for binding activity and/or other desired functional properties. Mutational methods have been described in the art. For example, PCT Publication WO 02/092780 by Short describes methods for creating and screening antibody mutations using saturation mutagenesis, synthetic ligation assembly, or a combination thereof. Alternatively, PCT Publication WO 03/074679 by Lazar et al. describes methods of using computational screening methods to optimize physiochemical properties of antibodies.

### Nucleic Acid Molecules Encoding Antibodies

[3091] Using the information provided herein, for example, the nucleic acid and amino acid sequences disclosed herein; a nucleic acid molecule encoding the antibodies or antigen-binding fragment thereof can be obtained. Such a nucleic acid molecule can be obtained, for example, using conventional methods disclosed in the art. Nucleic acid molecules of the present disclosure may be in the form of RNA, such as mRNA, hnRNA, tRNA or any other form, or in the form of DNA, including but not limited to, cDNA and genomic DNA obtained by cloning or produced synthetically, or any combinations thereof. The DNA may be triplex, duplex or single-stranded, or any combination thereof. Any portion of at least one strand of the DNA or RNA may be the coding strand, also known as the sense strand, or it can be the antisense strand, also known as the antisense strand.

[3092] “Polynucleotide,” or “nucleic acid,” or “nucleic acid molecule” as used interchangeably herein, refer to polymers of nucleotides of any length, and include DNA and RNA. The nucleotides can be deoxyribonucleotides, ribonucleotides, modified nucleotides or bases, and/or their analogs, or any substrate that can be incorporated into a polymer by DNA or RNA polymerase. A polynucleotide may comprise modified nucleotides, such as methylated nucleotides and their analogs. If present, modification to the nucleotide structure may be imparted before or after assembly of the polymer. The sequence of nucleotides may be interrupted by non-nucleotide components. A polynucleotide may be further modified after polymerization, such as by conjugation with a labeling component. Other types of modifications include, for example, “caps”, substitution of one or more of the naturally occurring nucleotides with an analog, internucleotide modifications such as, for example, those with uncharged linkages (e.g., methyl phosphonates, phosphotriesters, phosphoamidates, carbamates, etc.) and with charged linkages (e.g., phosphorothioates, phosphorodithioates, etc.), those containing pendant moieties, such as, for example, proteins (e.g., nucleases, toxins, antibodies, signal peptides, ply-L-lysine, etc.), those with intercalators (e.g., acridine, psoralen, etc.), those containing chelators (e.g., metals, radioactive metals, boron, oxidative metals, etc.), those containing alkylators, those with modified linkages (e.g., alpha anomeric nucleic acids, etc.), as well as unmodified forms of the polynucleotide(s). Further, any of the hydroxyl groups ordinarily present in the sugars may be replaced, for example, by phosphonate groups, phosphate groups, protected by standard protecting groups, or activated to prepare additional linkages to additional nucleotides, or may be conjugated to solid supports. The 5′ and 3′ terminal OH can be phosphorylated or substituted with amines or organic capping group moieties of from 1 to 20 carbon atoms. Other hydroxyls may also be derivatized to standard protecting groups. Polynucleotides can also contain analogous forms of ribose or deoxyribose sugars that are generally known in the art, including, for example, 2′-O-methyl-, 2′-O-allyl, 2′-fluoro- or 2′-azido-ribose, carbocyclic sugar analogs, α-anomeric sugars, epimeric sugars such as arabinose, xyloses or lyxoses, pyranose sugars, furanose sugars, sedoheptuloses, acyclic analogs and abasic nucleoside analogs such as methyl riboside. One or more phosphodiester linkages may be replaced by alternative linking groups. These alternative linking groups include, but are not limited to, embodiments wherein phosphate is replaced by P(O)S(“thioate”), P(S)S (“dithioate”), “(O)NR2 (“amidate”), P(O)R, P(O)OR′, CO or CH2 (“formacetal”), in which each R or R′ is independently H or substituted or unsubstituted alkyl (1-20 C) optionally containing an ether (—O—) linkage, aryl, alkenyl, cycloalkyl, cycloalkenyl or araldyl. Not all linkages in a polynucleotide need be identical. The preceding description applies to all polynucleotides referred to herein, including RNA and DNA.

[3093] In the context of the present invention, the following abbreviations for the commonly occurring nucleic acid bases are used. “A” refers to adenosine, “C” refers to cytosine, “G” refers to guanosine, “T” refers to thymidine, and “U” refers to uridine. In some embodiments, the nucleic acid molecule comprises an isolated nucleic acid. In some embodiments, a nucleic acid molecule comprises one more nucleic acid sequences operably linked to one another. The term “operably linked” or “transcriptional control” refers to functional linkage between a regulatory sequence and a heterologous nucleic acid sequence resulting in expression of the latter. For example, a first nucleic acid sequence is operably linked with a second nucleic acid sequence when the first nucleic acid sequence is placed in a functional relationship with the second nucleic acid sequence. For instance, a promoter is operably linked to a coding sequence if the promoter affects the transcription or expression of the coding sequence. Operably linked DNA sequences can be contiguous with each other and, e.g., where necessary to join two protein coding regions, are in the same reading frame.

[3094] “Isolated nucleic acid”, as used herein, is a nucleic acid that is substantially separated from other genome DNA sequences as well as proteins or complexes such as ribosomes and polymerases, which naturally accompany a native sequence. The term embraces a nucleic acid sequence that has been removed from its naturally occurring environment, and includes recombinant or cloned DNA isolates and chemically synthesized analogues or analogues biologically synthesized by heterologous systems. A substantially pure nucleic acid includes isolated forms of the nucleic acid. Of course, this refers to the nucleic acid as originally isolated and does not exclude genes or sequences later added to the isolated nucleic acid by the hand of man.

[3095] Another aspect of the present disclosure pertains to nucleic acid molecules comprising nucleic acid sequences that encode the antibody polypeptide, described herein or antigen-binding fragment thereof. In some embodiments, the nucleic acid sequence encoding a heavy chain polypeptide is selected from any one of SEQ ID NOs: 2169-2439. In some embodiments, the isolated nucleic acid molecule comprises a nucleic acid sequence encoding a light chain polypeptide of an antibody. In some embodiments, the nucleic acid sequence encoding a light chain polypeptide is selected from any one of SEQ ID NOs: 2440-2710. In some embodiments, the isolated nucleic acid molecule comprises a nucleic acid sequence encoding a CDR1, CDR2, or CDR3 polypeptide of a variable heavy chain. In some embodiments, the isolated nucleic acid molecule comprises a nucleic acid sequence encoding a CDR1, CDR2, or CDR3 polypeptide of a variable light chain. In some embodiments, the nucleic acid sequence encoding the CDR1 polypeptide of a variable heavy chain (CDR-H1) is selected from any one of SEQ ID NOS: 2711-2981. In some embodiments, the nucleic acid sequence encoding the CDR2 polypeptide of a variable heavy chain (CDR-H2) is selected from any one of SEQ ID NOS: 3253-3523. In some embodiments, the nucleic acid sequence encoding the CDR3 polypeptide of a variable heavy chain (CDR-H3) is selected from any one of SEQ ID NOS: 3795-4065.

[3096] In some embodiments, the nucleic acid molecule comprises a sequence encoding a CDR1, CDR2, or CDR3 polypeptide of a variable light chain. In some embodiments, the nucleic acid sequence encoding the CDR1 region of a variable light chain polypeptide is selected from any one of SEQ ID NOS: 2982-3252. In some embodiments, the nucleic acid sequence encoding the CDR2 region of a variable light chain polypeptide is selected from any one of SEQ ID NOS: 3524-3794. In some embodiments, the nucleic acid sequence encoding the CDR3 region of a variable light chain polypeptide is selected from any one of SEQ ID NOS: 4056-4336. The nucleic acids can be present in whole cells, in a cell lysate, or in a partially purified or substantially pure form. A nucleic acid is “isolated” or “rendered substantially pure” when purified away from other cellular components or other contaminants, e.g., other cellular nucleic acids or proteins, by standard techniques, including alkaline/SDS treatment, CsCl banding, column chromatography, agarose gel electrophoresis and others well known in the art. See, F. Ausubel, et al., ed. (1987) Current Protocols in Molecular Biology, Greene Publishing and Wiley Interscience, New York. A nucleic acid according to at least some embodiments of the disclosure can be, for example, DNA or RNA and may or may not contain intronic sequences. In a preferred embodiment, the nucleic acid is a cDNA molecule.

[3097] Nucleic acids according to at least some embodiments of the present disclosure can be obtained using standard molecular biology techniques. For antibodies expressed by hybridomas (e.g., hybridomas prepared from transgenic mice carrying human immunoglobulin genes as described further below), cDNAs encoding the light and heavy chains of the antibody made by the hybridoma can be obtained by standard PCR amplification or cDNA cloning techniques. For antibodies obtained from an immunoglobulin gene library (e.g., using phage display techniques), nucleic acid encoding the antibody can be recovered from the library.

[3098] Once DNA fragments encoding VH and VL segments are obtained, these DNA fragments can be further manipulated by standard recombinant DNA techniques, for example to convert the variable region genes to full-length antibody chain genes, to Fab fragment genes or to a scFv gene. In these manipulations, a VL- or VH-encoding DNA fragment is operatively linked to another DNA fragment encoding another protein, such as an antibody constant region or a flexible linker. The term “operatively linked”, as used in this context, is intended to mean that the two DNA fragments are joined such that the amino acid sequences encoded by the two DNA fragments remain in-frame. The isolated DNA encoding the VH region can be converted to a full-length heavy chain gene by operatively linking the VH-encoding DNA to another DNA molecule encoding heavy chain constant regions (CH1, CH2 and CH3). The sequences of human heavy chain constant region genes are known in the art (see e.g., Kabat, E. A., et al. (1991) Sequences of Proteins of Immunological Interest, Fifth Edition, U.S. Department of Health and Human Services, NIH Publication No. 91-3242) and DNA fragments encompassing these regions can be obtained by standard PCR amplification. The heavy chain constant region can be an IgG1, IgG2, IgG3, IgG4, IgA, IgE, IgM or IgD constant region, but most preferably is an IgG1 or IgG4 constant region. For a Fab fragment heavy chain gene, the VH-encoding DNA can be operatively linked to another DNA molecule encoding only the heavy chain CH1 constant region.

[3099] The isolated DNA encoding the VL region can be converted to a full-length light chain gene (as well as a Fab light chain gene) by operatively linking the VL-encoding DNA to another DNA molecule encoding the light chain constant region, CL. The sequences of human light chain constant region genes are known in the art (see e.g., Kabat, E. A., et al. (1991) Sequences of Proteins of Immunological Interest, Fifth Edition, U.S. Department of Health and Human Services, NIH Publication No. 91-3242) and DNA fragments encompassing these regions can be obtained by standard PCR amplification. The light chain constant region can be a kappa or lambda constant region, but most preferably is a kappa constant region.

[3100] To create a scFv gene, the VH- and VL-encoding DNA fragments are operatively linked to another fragment encoding a flexible linker, e.g., encoding the amino acid sequence (Gly-Gly-Gly-Gly-Ser)3, such that the VH and VL sequences can be expressed as a contiguous single-chain protein, with the VL and VH regions joined by the flexible linker (see e.g., Bird et al. (1988) Science 242:423-426; Huston et al. (1988) Proc. Natl. Acad. Sci. USA 85:5879-5883; McCafferty et al., (1990) Nature 348:552-554).

[3101] In one aspect, the present disclosure provides methods for treatment or prevention of cancer comprising administering nucleic acid molecules, wherein the nucleic acid molecules encode for a VH, VL, CDR3 region of VH or CDR 3 region of VL or antigen-binding fragment thereof, wherein the nucleic acid molecule comprises a sequence disclosed herein (e.g. Table 2) by way of gene therapy. Gene therapy refers to therapy performed by the administration to a subject of an expressed or expressible nucleic acid. In this embodiment of the invention, the nucleic acids produce their encoded protein that mediates a prophylactic or therapeutic effect. Any of the methods for gene therapy available in the art can be used according to the embodiments herein.

[3102] For general reviews of the methods of gene therapy, see Goldspiel et al., 1993, Clinical Pharmacy 12:488-505; Wu and Wu, 1991, Biotherapy 3:87-95; Tolstoshev, 1993, Ann. Rev. Pharmacol. Toxicol. 32:573-596; Mulligan, 1993, Science 260:926-932; and Morgan and Anderson, 1993, Ann. Rev. Biochem. 62:191-217; May, 1993, TIBTECH 11(5):155-215. Methods. commonly known in the art of recombinant DNA technology which can be used are described in Ausubel et al. (eds.), 1993, Current Protocols in Molecular Biology, John Wiley & Sons, NY; and Kriegler, 1990, Gene Transfer and Expression, A Laboratory Manual, Stockton Press, NY. Delivery of a therapeutic antibody to appropriate cells can be effected via gene therapy ex vivo, in situ, or in vivo by use of any suitable approach known in the art, including by use of physical DNA transfer methods (e.g., liposomes or chemical treatments) or by use of viral vectors (e.g., adenovirus, adeno-associated virus, or a retrovirus). For example, for in vivo therapy, a nucleic acid encoding the desired antibody, either alone or in conjunction with a vector, liposome, or precipitate may be injected directly into the subject, and in some embodiments, may be injected at the site where the expression of the antibody compound is desired. For ex vivo treatment, the subject's cells are removed, the nucleic acid is introduced into these cells, and the modified cells are returned to the subject either directly or, for example, encapsulated within porous membranes which are implanted into the patient. See, e.g. U.S. Pat. Nos. 4,892,538 and 5,283,187. There are a variety of techniques available for introducing nucleic acids into viable cells. The techniques vary depending upon whether the nucleic acid is transferred into cultured cells in vitro, or in vivo in the cells of the intended host. Techniques suitable for the transfer of nucleic acid into mammalian cells in vitro include the use of liposomes, electroporation, microinjection, cell fusion, DEAE-dextran, and calcium phosphate precipitation. A commonly used vector for ex vivo delivery of a nucleic acid is a retrovirus.

[3103] The term “host cell” as used herein refers to the particular subject cell transfected with a nucleic acid molecule and the progeny or potential progeny of such a cell. Progeny of such a cell may not be identical to the parent cell transfected with the nucleic acid molecule due to mutations or environmental influences that may occur in succeeding generations or integration of the nucleic acid molecule into the host cell genome.

[3104] Other in vivo nucleic acid transfer techniques include transfection with viral vectors (such as adenovirus, Herpes simplex I virus, or adeno-associated virus) and lipid-based systems. The nucleic acid and transfection agent are optionally associated with a microparticle. Exemplary transfection agents include calcium phosphate or calcium chloride co-precipitation, DEAE-dextran-mediated transfection, quaternary ammonium amphiphile DOTMA ((dioleoyloxypropyl) trimethylammonium bromide, commercialized as Lipofectin by GIBCO-BRL))(Felgner et al., (1987) Proc. Natl. Acad. Sci. USA 84, 7413-7417; Malone et al. (1989) Proc. Natl Acad. Sci. USA 86 6077-6081); lipophilic glutamate diesters with pendent trimethylammonium heads (Ito et al. (1990) Biochem. Biophys. Acta 1023, 124-132); the metabolizable parent lipids such as the cationic lipid dioctadecylamido glycylspermine (DOGS, Transfectam, Promega) and dipalmitoylphosphatidyl ethanolamylspermine (DPPES)(J. P. Behr (1986) Tetrahedron Lett. 27, 5861-5864; J. P. Behr et al. (1989) Proc. Natl. Acad. Sci. USA 86, 6982-6986); metabolizable quaternary ammonium salts (DOTB, N-(1-[2,3-dioleoyloxy]propyl)-N,N,N-trimethylammonium methylsulfate (DOTAP)(Boehringer Mannheim), polyethyleneimine (PEI), dioleoyl esters, ChoTB, ChoSC, DOSC)(Leventis et al. (1990) Biochim. Inter. 22, 235-241); 3beta[N—(N′,N′-dimethylaminoethane)-carbamoyl]cholesterol (DC-Chol), dioleoylphosphatidyl ethanolamine (DOPE)/3beta[N—(N′,N′dimethylaminoethane)-carbamoyl]cholesterolDC-Chol in one to one mixtures (Gao et al., (1991) Biochim. Biophys. Acta 1065, 8-14), spermine, spermidine, lipopolyamines (Behr et al., Bioconjugate Chem, 1994, 5: 382-389), lipophilic polylysines (LPLL) (Zhou et al., (1991) Biochim. Biophys. Acta 939, 8-18), [[(1, 1,3,3 tetramethylbutyl)cresoxy]ethoxy]ethyl]dimethylbnzylammonium hydroxide (DEBDA hydroxide) with excess phosphatidylcholine/cholesterol (Ballas et al., (1988) Biochim. Biophys. Acta 939, 8-18), cetyltrimethylammonium bromide (CTAB)/DOPE mixtures (Pinnaduwage et al., (1989) Biochim. Biophys. Acta 985, 33-37), lipophilic diester of glutamic acid (TMAG) with DOPE, CTAB, DEBDA, didodecylammonium bromide (DDAB), and stearylamine in admixture with phosphatidylethanolamine (Rose et al. (1991) Biotechnique 10, 520-525), DDAB/DOPE (TransfectACE, GIBCO BRL), and oligogalactose bearing lipids. Exemplary transfection enhancer agents that increase the efficiency of transfer include, for example, DEAE-dextran, polybrene, lysosome-disruptive peptide (Ohmori N I et al., Biochem Biophys Res Commun Jun. 27, 1997; 235(3):726-9), chondroitan-based proteoglycans, sulfated proteoglycans, polyethylenimine, polylysine (Pollard H et al. J Biol Chem, 1998 273 (13):7507-11), integrin-binding peptide CYGGRGDTP, linear dextran nonasaccharide, glycerol, cholesteryl groups tethered at the 3′-terminal internucleoside link of an oligonucleotide (Letsinger, R. L. 1989 Proc Natl Acad Sci USA 86: (17):6553-6), lysophosphatide, lysophosphatidylcholine, lysophosphatidylethanolamine, and 1-oleoyl lysophosphatidylcholine.

[3105] In some situations it may be desirable to deliver the nucleic acid with an agent that directs the nucleic acid containing vector to target cells. Such “targeting” molecules include antibodies specific for a cell-surface membrane protein on the target cell, or a ligand for a receptor on the target cell. Where liposomes are employed, proteins which bind to a cell-surface membrane protein associated with endocytosis may be used for targeting and/or to facilitate uptake. Examples of such proteins include capsid proteins and fragments thereof tropic for a particular cell type, antibodies for proteins which undergo internalization in cycling, and proteins that target intracellular localization and enhance intracellular half-life. In other embodiments, receptor-mediated endocytosis can be used. Such methods are described, for example, in Wu et al., 1987 or Wagner et al., 1990. For review of the currently known gene marking and gene therapy protocols, see Anderson 1992. See also WO 93/25673 and the references cited therein.

### Screening Methods for Identification of Target Antigens

### Binding Affinity

[3106] Antibodies may be screened for binding affinity by methods known in the art. For example, gel-shift assays, Western blots, radiolabeled competition assay, co-fractionation by chromatography, co-precipitation, cross linking, ELISA, and the like may be used, which are described in, for example, Current Protocols in Molecular Biology (1999) John Wiley & Sons, NY, which is incorporated herein by reference in its entirety.

[3107] To initially screen for antibodies which bind to the desired epitope on an antigen (e.g., a cancer associated antigen), a routine cross-blocking assay such as that described in Antibodies, A Laboratory Manual, Cold Spring Harbor Laboratory, Ed Harlow and David Lane (1988), can be performed. Routine competitive binding assays may also be used, in which the unknown antibody is characterized by its ability to inhibit binding of antigen to an antigen specific antibody of the invention. Intact antigen, fragments thereof, or linear epitopes can be used. Epitope mapping is described in Champe et al., J. Biol. Chem. 270: 1388-1394 (1995).

[3108] The antibodies or antigen-binding fragment thereof, described herein, may also be useful in preventing or treating cancer. The effectiveness of a candidate antibody or antigen-binding fragment thereof in preventing or treating cancer metastasis may be screened using a human amniotic basement membrane invasion model as described in Filderman et al., Cancer Res 52: 36616, 1992. In addition, any of the animal model systems for metastasis of various types of cancers may also be used. Such model systems include, but are not limited to, those described in Wenger et al., Clin. Exp. Metastasis 19: 169 73, 2002; Yi et al., Cancer Res. 62: 917 23, 2002; Tsutsumi et al., Cancer Lett., 169: 77-85, 2001; Tsingotjidou et al., Anticancer Res. 21: 971 8, 2001; Wakabayashi et al., Oncology 59: 75 80, 2000; Culp and Kogerman, Front Biosci. 3:D672 83, 1998; Runge et al., Invest Radiol. 32: 212 7; Shioda et al., J. Surg. Oneal. 64: 122 6, 1997; Ma et al., Invest Ophthalmol Vis Sci. 37: 2293 301, 1996; Kuruppu et al., J Gastroenterol Hepatol. 11: 26 32, 1996. In the presence of an effective antibody, cancer metastases may be prevented, or inhibited to result in fewer and/or smaller metastases.

[3109] The anti-tumor activity of a particular antibody, or combination of antibodies, or fragment thereof may be evaluated in vivo using a suitable animal model. For example, xenogenic lymphoma cancer models wherein human lymphoma cells are introduced into immune com-promised animals, such as nude or SCID mice. Efficacy may be predicted using assays which measure inhibition of tumor formation, tumor regression or metastasis, and the like.

[3110] In one variation of an in vitro assay, the present disclosure provides a method comprising the steps of (a) contacting an immobilized antigen with a candidate antibody and (b) detecting binding of the candidate antibody to the antigen. In an alternative embodiment, the candidate antibody is immobilized and binding of antigen is detected. Immobilization is accomplished using any of the methods well known in the art, including covalent bonding to a support, a bead, or a chromatographic resin, as well as non-covalent, high affinity interaction such as antibody binding, or use of streptavidin/biotin binding wherein the immobilized compound includes a biotin moiety. Detection of binding can be accomplished (i) using a radioactive label on the compound that is not immobilized, (ii) using a fluorescent label on the non-immobilized compound, (iii) using an antibody immunospecific for the non-immobilized compound, (iv) using a label on the non-immobilized compound that excites a fluorescent support to which the immobilized compound is attached, as well as other techniques well known and routinely practiced in the art.

### Modulator Activity

[3111] Antibodies that modulate (i.e., increase, decrease, or block) the activity or expression of desired target may be identified by incubating a putative modulator with a cell expressing the desired target and determining the effect of the putative modulator on the activity or expression of the target. The selectivity of an antibody that modulates the activity of a target polypeptide or polynucleotide can be evaluated by comparing its effects on the target polypeptide or polynucleotide to its effect on other related compounds. Selective modulators may include, for example, antibodies and other proteins, peptides, or organic molecules which specifically bind to target polypeptides or to a nucleic acid encoding a target polypeptide. Modulators of target activity will be therapeutically useful in treatment of diseases and physiological conditions in which normal or aberrant activity of target polypeptide is involved. The target can be a for example, but not limited to a cancer associated antigen.

[3112] The invention also comprehends high throughput screening (HTS) assays to identify antibodies that interact with or inhibit biological activity (i.e., inhibit enzymatic activity, binding activity, etc.) of an antigen. HTS assays permit screening of large numbers of compounds in an efficient manner. Cell-based HTS systems are contemplated to investigate the interaction between antibodies and their target antigen and their binding partners. HTS assays are designed to identify “hits” or “lead compounds” having the desired property, from which modifications can be designed to improve the desired property. Chemical modification of the “hit” or “lead compound” is often based on an identifiable structure/activity relationship between the “hit” and target antigen.

[3113] Another aspect of the present invention is directed to methods of identifying antibodies which modulate (i.e., decrease) activity of a target antigen comprising contacting a target antigen with an antibody, and determining whether the antibody modifies activity of the antigen. The activity in the presence of the test antibody is compared to the activity in the absence of the test antibody. Where the activity of the sample containing the test antibody is lower than the activity in the sample lacking the test antibody, the antibody will have inhibited activity.

[3114] A variety of heterologous systems is available for functional expression of recombinant polypeptides that are well known to those skilled in the art. Such systems include bacteria (Strosberg, et al., Trends in Pharmacological Sciences (1992) 13:95-98), yeast (Pausch, Trends in Biotechnology (1997) 15:487-494), several kinds of insect cells (Vanden Broeck, Int. Rev. Cytology (1996) 164:189-268), amphibian cells (Jayawickreme et al., Current Opinion in Biotechnology (1997) 8: 629-634) and several mammalian cell lines (CHO, HEK293, COS, etc.; see Gerhardt, et al., Eur. J. Pharmacology (1997) 334:1-23). These examples do not preclude the use of other possible cell expression systems, including cell lines obtained from nematodes (see, PCT application WO 98/37177).

[3115] In one embodiment of the invention, methods of screening for antibodies which modulate the activity of target antigen comprise contacting antibodies with a target antigen polypeptide and assaying for the presence of a complex between the antibody and the target antigen. In such assays, the ligand is typically labeled. After suitable incubation, free ligand is separated from that present in bound form, and the amount of free or uncomplexed label is a measure of the ability of the particular antibody to bind to the target antigen.

### High Throughput Screening

[3116] The present disclosure encompasses the use of HTS to identify and characterize target antigens. A HTS can be protein arrays (e.g., antibody arrays, antibody microarrays, protein microarray). The array can comprise one or more antibodies or antigen-binding fragment thereof, disclosed herein, immobilized on a solid support. Methods of production and use of such arrays are known well known in art (e.g., (Buessow et al., Nucleic Acids Res. 1998, Lueking et al., Mol Cell Proteomics., 2003; Angenendt et al., Mol Cell Proteomics., 2006) In some embodiments, very small amounts (e.g., 1 to 500 μg) of antibody or antigen-binding fragment thereof is immobilized. In some embodiments, there will be from 1 g to 100 g, from 1 g to 50 g, from 1 g to 20 g, from 3 g to 100 g, from 3 g to 50 g, from 3 g to 20, from 5 g to 100 g, from 5 g to 50 g, from 5 g to 20 g of antibody present in a single sample. In one aspect, at least one of the samples in a plurality of samples will have from 1 g to 100 g, from 1 g to 50 g, from 1 g to 20 g, from 3 g to 100 g, from 3 g to 50 g, from 3 g to 20, from 5 g to 100 g, from 5 g to 50 g, from 5 g to 20 g of antibody present. A solid support refers to an insoluble, functionalized material to which the antibodies can be reversibly attached, either directly or indirectly, allowing them to be separated from unwanted materials, for example, excess reagents, contaminants, and solvents. Examples of solid supports include, for example, functionalized polymeric materials, e.g., agarose, or its bead form Sepharose®, dextran, polystyrene and polypropylene, or mixtures thereof, compact discs comprising microfluidic channel structures; protein array chips; pipet tips; membranes, e.g., nitrocellulose or PVDF membranes; and microparticles, e.g., paramagnetic or non-paramagnetic beads. In some embodiments, an affinity medium will be bound to the solid support and the antibody will be indirectly attached to solid support via the affinity medium. In one aspect, the solid support comprises a protein A affinity medium or protein G affinity medium. A “protein A affinity medium” and a “protein G affinity medium” each refer to a solid phase onto which is bound a natural or synthetic protein comprising an Fc-binding domain of protein A or protein G, respectively, or a mutated variant or fragment of an Fc-binding domain of protein A or protein G, respectively, which variant or fragment retains the affinity for an Fc-portion of an antibody. Antibody arrays can be fabricated by the transfer of antibodies onto the solid surface in an organized high-density format followed by chemical immobilization. Representative techniques for fabrication of an array include photolithography, ink jet and contact printing, liquid dispensing and piezoelectrics. The patterns and dimensions of antibody arrays are to be determined by each specific application. The sizes of each antibody spot may be easily controlled by the users. Antibodies may be attached to various kinds of surfaces via diffusion, adsorption/absorption, or covalent cross-linking and affinity. Antibodies may be directly spotted onto a plain glass surface. To keep antibodies in a wet environment during the printing process, high percent glycerol (e.g., 30-40%) may be used in sample buffer and the spotting is carried out in a humidity-controlled environment.

### Antibody Arrays

[3117] The surface of a substrate may be modified to achieve better binding capacity. For example, the glass surface may be coated with a thin nitrocellulose membrane or poly-L-lysine such that antibodies can be passively adsorbed to the modified surface through non-specific interactions. Antibodies may be immobilized onto a support surface either by chemical ligation through a covalent bond or non-covalent binding. There are many known methods for covalently immobilizing antibodies onto a solid support. For example, MacBeath et al., (1999) J. Am. Chem. Soc. 121:7967-7968) use the Michael addition to link thiol-containing compounds to maleimide-derivatized glass slides to form a microarray of small molecules. See also, Lam & Renil (2002) Current Opin. Chemical Biol. 6:353-358. Depending upon, if the potential antigen is associated with a specific type of cancer, an antibody specific to a further biomarker may be included in the antibody array. Representative examples of biomarkers include, TROP/TNFRSF19, IL-1 sRI, uPAR, IL-10, VCAM-1 (CD106), IL-10 receptor-β, VE-cadherin, IL-13 receptor-al, VEGF, IL-13 receptor-a2, VEGF R2 (KDR), IL-17, VEGF R3

[3118] The arrays can employ single-antibody (label-base) detection or 2-antibody (sandwich-based) detection. In some embodiments, an ELISA (also known as an antibody sandwich assay) may be performed following standard techniques as follows. Antibodies used as the capture antibodies for an antigen disposed on (e.g., coated onto) a solid support, which may then be washed at least once (e.g., with water and/or a buffer such as PBS-t), followed by a standard blocking buffer, and then at least one more wash. The solid support may then be brought into contact with the sample/biosample under conditions to allow antibody-antigen complexes to form (e.g., incubating from 1 hour to about 24 hours at a temperature from about 4° C. to about room temperature). As used herein, “biosample” and “sample” are used interchangeably and embrace both fluids (also referred to herein as fluid samples and biofluids) and tissue obtained from the subject. The term “biofluid” as used herein refers to a biological fluid sample such as blood samples, cerebral spinal fluid (CSF), urine and other liquids obtained from the subject, or a solubilized preparation of such fluids wherein the cell components have been lysed to release intra-cellular contents into a buffer or other liquid medium. The definition also includes samples that have been manipulated in any way after their procurement, such as by treatment with reagents, or enrichment for certain components, such as proteins or polynucleotides. The term “blood sample” embraces whole blood, plasma, and serum. Solid tissue samples include biopsy specimens and tissue cultures or cells derived therefrom, and the progeny thereof. A sample may comprise a single cell or more than a single cell. The biosample may also be a cultured population of cells derived from the subject human or animal. However, whenever the biosample comprises a population of cells, the method will first require that the constituents of the cells be solubilized by lysing the cells, and removing solid cell debris, thereby providing a solution of the biomarkers. Samples can be prepared by methods known in the art such as lysing, fractionation, purification, including affinity purification, FACS, laser capture micro-dissection or iospycnic centrifugation. The support may then be washed at least once (e.g., with a buffer such as PBS-t). To detect the complexation between the capture antibodies and the antigen that may be present in the sample, secondary or “detection” antibodies are applied to the solid support (e.g., diluted in blocking buffer) under conditions to allow complexation between the secondary antibodies and the respective biomarkers (e.g., at room temperature for at least one hour). The secondary antibodies are selected so as to bind a different epitope on the antigen than the capture antibody. The optimum concentrations of capture and detection antibodies are determined using standard techniques such as the “criss-cross” method of dilutions. The detection antibody may be conjugated, directly or indirectly, to a detectable label.

[3119] The term “detectable label” as used herein refers to labeling moieties known in the art. Said moiety may be, for example, a radiolabel (e.g., 3H, 125I, 35S, 14C, 32P, etc.), detectable enzyme (e.g., horse radish peroxidase (HRP), alkaline phosphatase etc.), a dye (e.g., a fluorescent dye), a colorimetric label such as colloidal gold or colored glass or plastic (e.g., polystyrene, polypropylene, latex, etc.), beads, or any other moiety capable of generating a detectable signal such as a colorimetric, fluorescent, chemiluminescent or electrochemiluminescent (ECL) signal. The term “dye” as used herein refers to any reporter group whose presence can be detected by its light absorbing or light emitting properties. For example, Cy5 is a reactive water-soluble fluorescent dye of the cyanine dye family. Cy5 is fluorescent in the red region (about 650 to about 670 nm). It may be synthesized with reactive groups on either one or both of the nitrogen side chains so that they can be chemically linked to either nucleic acids or protein molecules. Labeling is done for visualization and quantification purposes. Cy5 is excited maximally at about 649 nm and emits maximally at about 670 nm, in the far red part of the spectrum; quantum yield is 0.28 (FW=792). Suitable fluorophores (chromes) for the probes of the disclosure may be selected from, but not intended to be limited to, fluorescein isothiocyanate (FITC, green), cyanine dyes Cy2, Cy3, Cy3.5, Cy5, Cy5.5 Cy7, Cy7.5 (ranging from green to near-infrared), Texas Red, and the like. Derivatives of these dyes for use in the embodiments of the disclosure may be, but are not limited to, Cy dyes (Amersham Bioscience), Alexa Fluors (Molecular Probes Inc.), HILYTE™ Fluors (AnaSpec), and DYLITE™ Fluors (Pierce, Inc). In some embodiments, the detectable label is a chromogenic label such as biotin, in which case the detection antibody-biotin conjugate is detected using Streptavidin/Horseradish Peroxidase (HRP) or the equivalent. The streptavidin may be diluted in an appropriate block and incubated for 30 minutes at room temperature. Other detectable labels suitable for use in the present invention include fluorescent labels and chemiluminescent labels.

[3120] The support may then be washed and the label (e.g., HRP enzymatic conjugate on the streptavidin) is detected using the following standard protocols such as a chromogenic system (the SIGMA FAST™ OPD system), a fluorescent system or a chemiluminescent system. The amounts of antigen present in the sample may then be read on an ELISA plate reader (e.g., SpectraMax 384 or the equivalent). The concentration of each of the antigens may then be back-calculated (e.g., by using the standard curve generated from purified antigens and multiplied by the dilution factor following standard curve fitting methods), and then compared to a control (generated from tissue samples obtained from healthy subjects).

[3121] In one embodiment, a biosample, e.g., a biofluid, is contacted with a system of reagents, well-known in the art, that can attach biotin moieties to some or all of the constituent components of the sample, and especially to the protein or peptide constituents thereof, including the biomarkers. Following this biotinylation step, the biotinylated biosample may then be contacted with the antibody array that contains an array of antibodies specific to each of the antigens.

[3122] After an adequate incubation period, readily selected to allow the binding of any antigen in the sample to its corresponding antibody of the array, the fluid sample is washed from the array. The array is then contacted with a biotin-binding polypeptide such as avidin or streptavidin, that has been conjugated with a detectable label (as described above in connection with the ELISA). Detection of the label on the array (relative to a control) will indicate which of the biomarkers captured by the respective antibody is present in the sample.

[3123] Regardless of the specific assay format, the biotin-label-based array methods are relatively advantageous from several standpoints. Biotin-label can be used as signal amplification. Biotin is the most common method for labeling protein and the label process can be highly efficient. Furthermore, biotin can be detected using fluorescence-streptavidin and, therefore, visualized via laser scanner, or HRP-streptavidin using chemiluminescence. Using biotin-label-based antibody arrays, most targeted proteins can be detected at pg/ml levels. The detection sensitivity of the present methods can be further enhanced by using 3-DNA detection technology or rolling circle amplification (Schweitzer et al., (2000) Proc. Natl. Acad. Sci. U.S.A. 97:10113-10119; Horie et al., (1996) Int. J. Hematol. 63:303-309).

[3124] As it relates to the present disclosure, the sample can be obtained from a subject having disease (e.g., cancer) and a healthy subject.

### Protein Arrays

[3125] In some embodiments, protein arrays can be used where protein antigens with known identities are immobilized on a solid support as capture molecules and one seeks to determine whether the known antigens binds to a candidate antibody. The antigen can be labeled with a tag that allows detection or immunoprecipitation after capture by an immobilized antibody. Protein antigens can be obtained, for example, from a cancer patient or a cancer cell. A number of commercial protein arrays are available e.g., PROTOARRAY®, KINEX™, RAYBIO® Human RTK Phosphorylation Antibody Array. The antibody-antigen complexes can be obtained by methods known in the art (e.g., immunoprecipitation or Western blot). For reviews on Protein array and antibody array that can be of interest in this study, see Reymond Sutandy, et al., 2013; Liu, B. C.-S., et al. 2012; Haab BB, 2005.

[3126] In an exemplary immunoprecipitation method, an antibody or antigen-binding fragment thereof, described herein is added first to a sample comprising an antigen, and incubated to allow antigen-antibody complexes to form. Subsequently, the antigen-antibody complexes are or with protein A/G-coated beads to allow them to absorb the complexes. In a modified approach, the antibody or antigen-binding fragment thereof is fused to a His tag or other tags (e.g., FLAG tag, Biotin Tag) by recombinant DNA techniques, and immunoprecipitated using an antibody to the tag (pull-down assay). The beads are then thoroughly washed, and the antigen is eluted from the beads by an acidic solution or SDS. The eluted sampled can be analyzed using Mass Spectrometry or SDS page to identify and confirm the antigen. Methods to analyze antibody-antigen complexes formed on a protein microarray and identify the antigen via mass spec are known.

### ADCC and CDC Assays

[3127] In one aspect, the antibodies or antigen-binding fragment thereof, disclosed herein, are contemplated as therapeutic antibodies for treatment of cancer. Accordingly, the antibodies or antigen-binding fragment thereof, can be further screened in an antibody-dependent cell-mediated cytotoxicity (ADCC) assay and/or Complement-dependent cytotoxicity (CDC) assay. “ADCC activity” refers to the ability of an antibody to elicit an ADCC reaction. ADCC is a cell-mediated reaction in which antigen-nonspecific cytotoxic cells that express FcRs (e.g., natural killer (NK) cells, neutrophils, and macrophages) recognize antibody bound to the surface of a target cell and subsequently cause lysis of (i.e., “kill”) the target cell (e.g., cancer cell). The primary mediator cells are natural killer (NK) cells. NK cells express FcγRIII only, with FcγRIIIA being an activating receptor and FcγRIIIB an inhibiting one; monocytes express FcγRI, FcγRII and FcγRIII (Ravetch et al. (1991) Annu. Rev. Immunol., 9:457-92). ADCC activity can be assessed directly using an in vitro assay, e.g., a 51Cr release assay using peripheral blood mononuclear cells (PBMC) and/or NK effector cells as described in the Examples and Shields et al. (2001) J. Biol. Chem., 276:6591-6604, or another suitable method known in the art. ADCC activity may be expressed as a concentration of antibody at which the lysis of target cells is half-maximal. Accordingly, in some embodiments, the concentration of an antibody or antigen-binding fragment thereof of the disclosure, at which the lysis level is the same as the half-maximal lysis level by the wild-type control, is at least 2—, 3-, 5-, 10-, 20-, 50-, 100-fold lower than the concentration of the wild-type control itself.

[3128] Additionally, in some embodiments, the antibody or antigen-binding fragment thereof of the present disclosure may exhibit a higher maximal target cell lysis as compared to the wild-type control. For example, the maximal target cell lysis of an antibody or Fc fusion protein of the invention may be 10%, 15%, 20%, 25% or more higher than that of the wild-type control. “Complement dependent cytotoxicity” or “CDC” refer to the ability of a molecule to lyse a target (e.g. cancer cell) in the presence of complement. The complement activation pathway is initiated by the binding of the first component of the complement system (C1q) to a molecule (e.g. an antibody) complexed with a cognate antigen. To assess complement activation, a CDC assay, e.g. as described in Gazzano-Santoro et al., J. Immunol. Methods 202:163 (1996), may be performed.

### Epitope Mapping

[3129] The term “epitope,” as used herein, refers to an antigenic determinant that interacts with a specific antigen-binding site in the variable region of an antibody molecule known as a paratope. A single antigen may have more than one epitope. Thus, different antibodies may bind to different areas on an antigen and may have different biological effects. Epitopes may be either conformational or linear. A conformational epitope is produced by spatially juxtaposed amino acids from different segments of the linear polypeptide chain. A linear epitope is one produced by adjacent amino acid residues in a polypeptide chain. In certain circumstance, an epitope may include moieties of saccharides, phosphoryl groups, or sulfonyl groups on the antigen.

[3130] Various techniques known to persons of ordinary skill in the art can be used to determine whether an antigen-binding domain of an antibody “interacts with one or more amino acids” within a polypeptide or protein. Exemplary techniques include, e.g., routine cross-blocking assay such as that described Antibodies, Harlow and Lane (Cold Spring Harbor Press, Cold Spring Harb., NY), alanine scanning mutational analysis, peptide blots analysis (Reineke, 2004, Methods Mol Biol 248:443-463), and peptide cleavage analysis. In addition, methods such as epitope excision, epitope extraction and chemical modification of antigens can be employed (Tomer, 2000, Protein Science 9:487-496). Another method that can be used to identify the amino acids within a polypeptide with which an antigen-binding domain of an antibody interacts is hydrogen/deuterium exchange detected by mass spectrometry. In general terms, the hydrogen/deuterium exchange method involves deuterium-labeling the protein of interest, followed by binding the antibody to the deuterium-labeled protein. Next, the protein/antibody complex is transferred to water to allow hydrogen-deuterium exchange to occur at all residues except for the residues protected by the antibody (which remain deuterium-labeled). After dissociation of the antibody, the target protein is subjected to protease cleavage and mass spectrometry analysis, thereby revealing the deuterium-labeled residues, which correspond to the specific amino acids with which the antibody interacts. See, e.g., Ehring (1999) Analytical Biochemistry 267(2):252-259; Engen and Smith (2001) Anal. Chem. 73:256A-265A. X-ray crystallography of the antigen/antibody complex may also be used for epitope mapping purposes.

[3131] The epitope on an antigen to which the antibody or antigen-binding fragment, disclosed herein, bind may consist of a single contiguous sequence of 3 or more (e.g., 3, 4, 5, 6, 7, 8, 9, 10, 11, 12, 13, 14, 15, 16, 17, 18, 19, 20 or more) amino acids of the antigen. Alternatively, the epitope may consist of a plurality of non-contiguous amino acids (or amino acid sequences) of antigen.

### Antigens

[3132] In some embodiments, the antibodies or antigen biding fragment thereof, disclosed herein, are directed to a cancer associated antigen. In some embodiments, the cancer associated antigen is a tumor antigen, i.e., a part of a tumor cell such as a protein or peptide expressed in a tumor cell which may be derived from the cytoplasm, the cell surface or the cell nucleus, in particular those which primarily occur intracellularly or as surface antigens of tumor cells. For example, tumor antigens include the carcinoembryonal antigen, al-fetoprotein, isoferritin, and fetal sulphoglycoprotein, a2-H-ferroprotein and γ-fetoprotein. The term “cancer associated antigen” as used herein can be any type of cancer antigen that may be associated with a cancer as is known in the art and includes antigens found on the cell surface, including tumor cells, as well as soluble cancer antigens. Several cell surface antigens on tumors and normal cells have soluble counterparts. A cancer associated antigen can be a cell surface antigen or a soluble cancer antigen located in the tumor microenvironment or otherwise in close proximity to the tumor being treated. Such antigens include but are not limited to those found on cancer-associated fibroblasts (CAFs), tumor endothelial cells (TEC) and tumor-associated macrophages (TAM). Examples of cancer-associated fibroblasts (CAFs) target antigens include but are not limited to: carbonic anhydrase IX (CAIX); fibroblast activation protein alpha (FAPa); and matrix metalloproteinases (MMPs) including MMP-2 and MMP-9. Examples of Tumor endothelial cell (TECs) target antigens include, but are not limited to vascular endothelial growth factor (VEGF) including VEGFR-1, 2, and 3; CD-105 (endoglin), tumor endothelia markers (TEMs) including TEM1 and TEM8; MMP-2; Survivin; and prostate-specific membrane antigen (PMSA). Examples of tumor associated macrophage antigens include, but are not limited to: CD105; MMP-9; VEGFR-1, 2, 3 and TEM8. In one embodiment, the cancer associated antibody specific for a cancer associated antigen may be specific for cancer antigens located on non-tumor cells, for example, VEGFR-2, MMPs, Survivin, TEM8 and PMSA. The cancer associated antigen may be an epithelial cancer antigen, (e.g., breast, gastrointestinal, lung), a prostate specific cancer antigen (PSA) or prostate specific membrane antigen (PSMA), a bladder cancer antigen, a lung (e.g., small cell lung) cancer antigen, a colon cancer antigen, an ovarian cancer antigen, a brain cancer antigen, a gastric cancer antigen, a renal cell carcinoma antigen, a pancreatic cancer antigen, a liver cancer antigen, an esophageal cancer antigen, or a head and neck cancer antigen. A cancer antigen can also be a lymphoma antigen (e.g., non-Hodgkin's lymphoma or Hodgkin's lymphoma), a B-cell lymphoma cancer antigen, a leukemia antigen, a myeloma (i.e., multiple myeloma or plasma cell myeloma) antigen, an acute lymphoblastic leukemia antigen, a chronic myeloid leukemia antigen, or an acute myelogenous leukemia antigen.

[3133] According to the present invention, a cancer associated antigen preferably comprises any antigen which is expressed in and optionally characteristic with respect to type and/or expression level for tumors or cancers as well as for tumor or cancer cells. In one embodiment, the term “tumor antigen” or “tumor-associated antigen” or “cancer antigen” or “cancer associated antigen” relates to proteins that are under normal conditions specifically expressed in a limited number of tissues and/or organs or in specific developmental stages, for example, the cancer associated antigen may be under normal conditions specifically expressed in stomach tissue, preferably in the gastric mucosa, in reproductive organs, e.g., in testis, in trophoblastic tissue, e.g., in placenta, or in germ line cells, and are expressed or aberrantly expressed in one or more tumor or cancer tissues. In this context, “a limited number” preferably means not more than 3, more preferably not more than 2. The cancer associated antigen in the context of the present invention include, for example, differentiation antigens, preferably cell type specific differentiation antigens, i.e., proteins that are under normal conditions specifically expressed in a certain cell type at a certain differentiation stage, cancer/testis antigens, i.e., proteins that are under normal conditions specifically expressed in testis and sometimes in placenta, and germ line specific antigens. Preferably, the cancer associated antigen or the aberrant expression of the cancer associated antigen identifies cancer cells. In the context of the present invention, the cancer associated antigen that is expressed by a cancer cell in a subject, e.g., a patient suffering from a cancer disease, is preferably a self-protein in said subject. In preferred embodiments, the cancer associated antigen in the context of the present invention is expressed under normal conditions specifically in a tissue or organ that is non-essential, i.e., tissues or organs which when damaged by the immune system do not lead to death of the subject, or in organs or structures of the body which are not or only hardly accessible by the immune system. A “cancer associated antigen”, as used herein can be any antigenic substance (antigen) produced or overexpressed in tumor cells. It can, for example, trigger an immune response in the host. Alternatively, for purposes of this disclosure, cancer associated antigens can be proteins that are expressed by both healthy and tumor cells, but because they identify a certain tumor type, they can be a suitable therapeutic target. Non-limiting examples of cancer associated antigen include CD19, CD20, CD30, CD33, CD38, Her2/neu, ERBB2, CA125, MUC-1, prostate-specific membrane antigen (PSMA), CD44 surface adhesion molecule, mesothelin, carcinoembryonic antigen (CEA), epidermal growth factor receptor (EGFR), EGFRvIII, vascular endothelial growth factor receptor-2 (VEGFR2), high molecular weight-melanoma associated antigen (HMW-MAA), MAGE-A1, IL-13R-a2, GD2, or any combination thereof.

[3134] In some embodiments, the cancer associated antigen is 1p19q, ABL1, AKT1, ALK, APC, AR, ATM, BRAF, BRCA1, BRCA2, cKIT, cMET, CSF1R, CTNNB1, EGFR, EGFRvIII, ER, ERBB2 (HER2), FGFR1, FGFR2, FLT3, GNA11, GNAQ, GNAS, HER2, HRAS, IDH1, IDH2, JAK2, KDR (VEGFR2), KRAS, MGMT, MGMT-Me, MLH1, MPL, NOTCHI, NRAS, PDGFRA, Pgp, PIK3CA, PR, PTEN, RET, RRM1, SMO, SPARC, TLE3, TOP2A, TOPO1, TP53, TS, TUBB3, VHL, CDH1, ERBB4, FBXW7, HNF1A, JAK3, NPM1, PTPN11, RB1, SMAD4, SMARCB1, STK1, MLH1, MSH2, MSH6, PMS2, microsatellite instability (MSI), ROS1, ERCC1, or any combination thereof. According to the invention, the terms “cancer associated antigen” “tumor antigen”, “tumor expressed antigen”, “cancer antigen” “cancer associated antigen” and “cancer expressed antigen” are equivalents and are used interchangeably herein. In some embodiments, an antibody or antigen binding fragment thereof of the present disclosure binds an antigen provided in the Table 3 and table 4.

### Immunotherapy

[3135] In one aspect of the present disclosure, the antibodies or antigen-binding fragment thereof, disclosed herein, can initiate a potent immune response against the tumor and/or are capable of direct cytotoxicity. In this regard, the antibodies or antigen-binding fragment thereof herein may elicit tumor cell lysis by either complement-mediated or antibody-dependent cell cytotoxicity (ADCC) mechanisms, both of which require an intact Fe portion of the immunoglobulin molecule for interaction with effector cell Fe receptor sites or complement proteins. In addition, antibodies that exert a direct biological effect on tumor growth are useful in the practice of the disclosure. Potential mechanisms by which such directly cytotoxic antibodies may act include inhibition of cell growth, modulation of cellular differentiation, modulation of tumor angiogenesis factor profiles, and the induction of apoptosis. The mechanism by which a particular antibody or an antigen-binding fragment thereof, disclosed herein, exerts an anti-tumor effect may be evaluated using any number of in vitro assays designed to determine ADCC, ADMMC, complement-mediated cell lysis, and so forth, as is generally known in the art.

### Immunoconjugates

[3136] The antibodies or antigen-binding fragment thereof, disclosed herein, may be administered in their “naked” or unconjugated form, or may have therapeutic agents conjugated to them. In one embodiment, antibodies or antigen-binding fragment thereof are used as a radiosensitizer. In such embodiments, the antibodies or antigen-binding fragment are conjugated to a radiosensitizing agent. The term “radiosensitizer,” as used herein, is defined as a molecule, preferably a low molecular weight molecule, administered to animals in therapeutically effective amounts to increase the sensitivity of the cells to be radiosensitized to electromagnetic radiation and/or to promote the treatment of diseases that are treatable with electromagnetic radiation. Diseases that are treatable with electromagnetic radiation include neoplastic diseases, benign and malignant tumors, and cancerous cells.

Conjugation with Radiosensitizing Agents

[3137] The terms “electromagnetic radiation” and “radiation” as used herein include, but are not limited to, radiation having the wavelength of 10-20 to 100 meters. Preferred embodiments of the present disclosure can employ for example, the electro-magnetic radiation of: gamma-radiation c10-20 to 10-13 m), X-ray radiation (10-12 to 10-9 m), ultraviolet light (10 nm to 400 nm), visible light (400 nm to 700 nm), infrared radiation (700 nm to 1.0 mm), and microwave radiation (1 mm to 30 cm).

[3138] Radiosensitizers are known to increase the sensitivity of cancerous cells to the toxic effects of electromagnetic radiation. Many cancer treatment protocols currently employ radiosensitizers activated by the electromagnetic radiation of X-rays. Examples of X-ray activated radiosensitizers include, but are not limited to, the following: metronidazole, misonidazole, desmethylmisonidazole, pimonidazole, etanidazole, nimorazole, mitomycin C, RSU 1069, SR 4233, E09, RB 6145, nicotinamide, 5-bromode-oxyuridine (BUdR), 5-iododeoxyuridine (IUdR), bromode-oxycytidine, fluorodeoxyuridine (FUdR), hydroxyurea, cisplatin, and therapeutically effective analogs and derivatives of the same.

[3139] Photodynamic therapy (PDT) of cancers employs visible light as the radiation activator of the sensitizing agent. Examples of photodynamic radiosensitizers include the following, but are not limited to: hematoporphyrin derivatives, PHOTOFRIN®, benzoporphyrin derivatives, NPe6, tin etioporphyrin (SnET2), pheoborbide-a, bacteriochlorophyll-a, naphthalocyanines, phthalocyanines, zinc phthalocyanine, and therapeutically effective analogs and derivatives of the same.

[3140] In another embodiment, the antibody may be conjugated to a receptor (such streptavidin) for utilization in tumor pretargeting wherein the antibody-receptor conjugate is administered to the patient, followed by removal of unbound conjugate from the circulation using a clearing agent and then administration of a ligand (e.g., avidin) which is conjugated to a cytotoxic agent (e.g., a radionuclide).

Conjugation with Detectable Labels

[3141] The present disclosure further provides the above-described antibodies or antigen-binding thereof in detectably labeled form. Antibodies can be detectably labeled through the use of radioisotopes, affinity labels (such as biotin, avidin, etc.), enzymatic labels (such as horseradish peroxidase, alkaline phosphatase, etc.) fluorescent or luminescent or bioluminescent labels (such as FITC or rhodamine, etc.), paramagnetic atoms, and the like. Procedures for accomplishing such labeling are well known in the art; for example, see (Sternberger, L. A. et al., J. Histochem. Cytochem. 18:315 (1970); Bayer, E. A. et al., Meth. Enzym. 62:308 (1979); Engval, E. et al., Immunol. 109:129 (1972); Goding, J. W. J. Immunol. Meth. 13:215 (1976)).

[3142] “Label” refers to a detectable compound or composition which is conjugated directly or indirectly to the antibody. The label may itself be detectable by itself (e.g., radioisotope labels or fluorescent labels) or, in the case of an enzymatic label, may catalyze chemical alteration of a substrate compound or composition which is detectable. Alternatively, the label may not be detectable on its own but may be an element that is bound by another agent that is detectable (e.g., an epitope tag or one of a binding partner pair such as biotin-avidin, etc.). Thus, the antibody may comprise a label or tag that facilitates its isolation, and methods of the invention to identify antibodies include a step of isolating the antigen/antibody through interaction with the label or tag.

[3143] Exemplary therapeutic immunoconjugates comprise the antibody described herein conjugated to a cytotoxic agent such as a chemotherapeutic agent, toxin (e.g., an enzymatically active toxin of bacterial, fungal, plant or animal origin, or fragments thereof), or a radioactive isotope (i.e., a radioconjugate).

Fusion proteins are described in further detail below.

[3144] In some embodiments, antibodies and antigen-binding fragments thereof disclosed herein can be conjugated to a therapeutic agent such as a chemotherapeutic cytotoxin, such as a cytostatic or cytocidal agent (e.g., paclitaxol, cytochalasin B or diphtheria toxin, taxol, cytochalasin B, gramicidin D, ethidium bromide, emetine, mitomycin, etoposide, tenoposide, vincristine, vinblastine, colchicin, doxorubicin, daunorubicin, dihydroxy anthracindione, mitoxantrone, mithramycin, actinomycin D, 1-dehydrotestosterone, glucocorticoids, procaine, tetracaine, lidocaine, propranolol, and puromycin and analogs or homologs thereof), antimetabolites (e.g., methotrexate, 6-mercaptopurine, 6-thioguanine, cytarabine, fludarabin, 5-fluorouracil decarbazine), alkylating agents (e.g., mechlorethamine, thioepa chlorambucil, melphalan, carmustine (BSNU) and lomustine (CCNU), cyclophosphamide, busulfan, dibromomannitol, streptozotocin, mitomycin C, and cis-dichlorodiamine platinum (II) (DDP) cisplatin), anthracyclines (e.g., daunorubicin (formerly daunomycin) and doxorubicin), antibiotics (e.g., dactinomycin (formerly actinomycin), bleomycin, mithramycin, and anthramycin (AMC), and anti-mitotic agents, a thrombotic or anti-angiogenic agent or a radioactive label. Examples of suitable cytotoxic agents and chemotherapeutic agents for forming immunoconjugates are known in the art; see, for example, WO 05/103081. In another embodiment, antibodies and antigen-binding fragments thereof disclosed herein are conjugated to a detectable substrate such as, e.g., an enzyme, fluorescent marker, chemiluminescent marker, bioluminescent material, or radioactive material. In some embodiments of the aspects described herein, the antibody and antibody fragments thereof disclosed herein are conjugated to a toxin (e.g., an enzymatically active toxin of bacterial, fungal, plant or animal origin, or fragments thereof), a small molecule, an siRNA, a nanoparticle, a targeting agent (e.g., a microbubble), or a radioactive isotope (i.e., a radioconjugate). Such conjugates are referred to herein as “immunoconjugates”. Such immunoconjugates can be used, for example, in diagnostic, theranostic, or targeting methods.

[3145] Enzymatically active toxins and fragments thereof which can be used include diphtheria A chain, nonbinding active fragments of diphtheria toxin, exotoxin A chain (from Pseudomonas aeruginosa), ricin A chain, abrin A chain, modeccin A chain, alpha-sarcin, Aleurites fordii proteins, dianthin proteins, Phytolacca americana proteins (PAPI, PAPII, and PAP-S), Momordica charantia inhibitor, curcin, crotin, Sapaonaria officinalis inhibitor, gelonin, mitogellin, restrictocin, phenomycin, enomycin and the tricothecenes. A variety of radioisotopes are available for the production of radioconjugate antibodies. Examples include, but are not limited to, 212 Bi, 131I, 131 In, 90Y and 186Re.

[3146] Conjugates of the antibodies or antigen-binding fragments thereof described herein and a cytotoxic agent can be made using any of a variety of bifunctional protein coupling agents such as N-succinimidyl-3-(2-pyridyldithiol) propionate (SPDP), iminothiolane (IT), bifunctional derivatives of imidoesters (such as dimethyl adipimidate HCL), active esters (such as disuccinimidyl suberate), aldehydes (such as glutareldehyde), bis-azido compounds (such as bis (p-azidobenzoyl) hexanediamine), bis-diazonium derivatives (such as bis-(p-diazoniumbenzoyl)-ethylenediamine), diisocyanates (such as tolyene 2,6-diisocyanate), and bis-active fluorine compounds (such as 1,5-difluoro-2,4-dinitrobenzene). For example, a ricin immunotoxin can be prepared as described in Vitetta et al., 238 Science 1098 (1987). Carbon-14-labeled 1-isothiocyanatobenzyl-3-methyldiethylene triaminepentaacetic acid (MX-DTPA) is an exemplary chelating agent for conjugation of radionucleotide to the antibody. See WO 94/11026.

[3147] In other embodiments, the antibody or portion thereof can be conjugated to a “receptor” (e.g., streptavidin) for utilization in tumor pretargeting wherein the antibody-receptor conjugate is administered to the subject, followed by removal of unbound conjugate from the circulation using a clearing agent and then administration of a “ligand” (e.g., avidin) which is conjugated to a cytotoxic agent (e.g., a radionucleotide). In some embodiments, the antibody or antibody fragment thereof can be conjugated to biotin, and the biotin conjugated antibody or antibody fragment thereof can be further conjugated or linked to a streptavidin-bound or -coated agent, such as a streptavidin-coated microbubble, for use in, for example, molecular imaging of angiogenesis.

### Immunoconjugate Production Techniques

[3148] Techniques for conjugating such therapeutic moiety to antibodies are well known, see, e.g., Amon et al., “Monoclonal Antibodies For Immunotargeting Of Drugs In Cancer Therapy”, in Monoclonal Antibodies And Cancer Therapy, Reisfeld et al. (eds.), pp. 243-56 (Alan R. Liss, Inc. 1985); Hellstrom et al., “Antibodies For Drug Delivery”, in Controlled Drug Delivery (2nd Ed.), Robinson et al. (eds.), pp. 623-53 (Marcel Dekker, Inc. 1987); Thorpe, “Antibody Carriers Of Cytotoxic Agents In Cancer Therapy: A Review”, in Monoclonal Antibodies '84: Biological And Clinical Applications, Pinchera et al. (eds.), pp. 475-506 (1985); “Analysis, Results, And Future Prospective Of The Therapeutic Use Of Radiolabeled Antibody In Cancer Therapy”, in Monoclonal Antibodies For Cancer Detection And Therapy, Baldwin et al. (eds.), pp. 303-16 (Academic Press 1985), and Thorpe et al., “The Preparation And Cytotoxic Properties Of Antibody-Toxin Conjugates”, Immunol. Rev., 62: 119-58 (1982).

[3149] Production of immunoconjugates is described in, for example, U.S. Pat. No. 6,306,393. Immunoconjugates can be prepared by indirectly conjugating a therapeutic agent to an antibody component. General techniques are described in Shih et al., Int. J. Cancer 41:832-839 (1988); Shih et al., Int. J. Cancer 46:1101-1106 (1990); and Shih et al., U.S. Pat. No. 5,057,313. The general method involves reacting an antibody component having an oxidized carbohydrate portion with a carrier polymer that has at least one free amine function and that is loaded with a plurality of drug, toxin, chelator, boron addends, or other therapeutic agent. This reaction results in an initial Schiff base (imine) linkage, which can be stabilized by reduction to a secondary amine to form the final conjugate.

[3150] The carrier polymer is preferably an aminodextran or polypeptide of at least 50 amino acid residues, although other substantially equivalent polymer carriers can also be used. Preferably, the final immunoconjugate is soluble in an aqueous solution, such as mammalian serum, for ease of administration and effective targeting for use in therapy. Thus, solubilizing functions on the carrier polymer will enhance the serum solubility of the final immunoconjugate. In particular, an aminodextran will be preferred.

[3151] The process for preparing an immunoconjugate with an aminodextran carrier typically begins with a dextran polymer, advantageously a dextran of average molecular weight of about 10,000-100,000. The dextran is reacted with an oxidizing agent to affect a controlled oxidation of a portion of its carbohydrate rings to generate aldehyde groups. The oxidation is conveniently affected with glycolytic chemical reagents such as NaI04, according to conventional procedures.

[3152] The oxidized dextran is then reacted with a polyamine, preferably a diamine, and more preferably, a mono- or polyhydroxy diamine. Suitable amines include ethylene diamine, propylene diamine, or other like polymethylene diamines, diethylene triamine or like polyamines, 1,3-diamino-2-hydroxypropane, or other like hydroxylated diamines or polyamines, and the like. An excess of the amine relative to the aldehyde groups of the dextran is used to ensure substantially complete conversion of the aldehyde functions to Schiff base groups.

[3153] A reducing agent, such as NaBH4, NaBH3CN or the like, is used to effect reductive stabilization of the resultant Schiff base intermediate. The resultant adduct can be purified by passage through a conventional sizing column to remove cross-linked dextrans. Other conventional methods of derivatizing a dextran to introduce amine functions can also be used, e.g., reaction with cyanogen bromide, followed by reaction with a diamine. The aminodextran is then reacted with a derivative of the particular drug, toxin, chelator, immunomodulator, boron addend, or other therapeutic agent to be loaded, in an activated form, preferably, a carboxyl-activated derivative, prepared by conventional means, e.g., using dicyclohexylcarbodiimide (DCC) or a water soluble variant thereof, to form an intermediate adduct.

[3154] Alternatively, polypeptide toxins such as poke-weed antiviral protein or ricin A-chain, and the like, can be coupled to aminodextran by glutaraldehyde condensation or by reaction of activated carboxyl groups on the protein with amines on the aminodextran. Chelators for radiometals or magnetic resonance enhancers are well-known in the art. Typical are derivatives of ethylenediaminetetraacetic acid (EDTA) and diethylen-etriaminepentaacetic acid (DTPA). These chelators typically have groups on the side chain by which the chelator can be attached to a carrier. Such groups include, e.g., benzylisothiocyanate, by which the DTPA or EDTA can be coupled to the amine group of a carrier. Alternatively, carboxyl groups or amine groups on a chelator can be coupled to a carrier by activation or prior derivatization and then coupling, all by well-known means.

[3155] Boron addends, such as carboranes, can be attached to antibody components by conventional methods. For example, carboranes can be prepared with carboxyl functions on pendant side chains, as is well known in the art. Attachment of such carboranes to a carrier, e.g., aminodextran, can be achieved by activation of the carboxyl groups of the carboranes and condensation with amines on the carrier to produce an intermediate conjugate. Such intermediate conjugates are then attached to antibody components to produce therapeutically useful immunoconjugates, as described below.

[3156] A polypeptide carrier can be used instead of aminodextran, but the polypeptide carrier should have at least 50 amino acid residues in the chain, preferably 100-5000 amino acid residues. At least some of the amino acids should be lysine residues or glutamate or aspartate residues. The pendant amines of lysine residues and pendant carboxylates of glutamine and aspartate are convenient for attaching a drug, toxin, immunomodulator, chelator, boron addend or other therapeutic agent. Examples of suitable polypeptide carriers include polylysine, polyglutamic acid, polyaspartic acid, co-polymers thereof, and mixed polymers of these amino acids and others, e.g., serines, to confer desirable solubility properties on the resultant loaded carrier and immunoconjugate.

[3157] Conjugation of the intermediate conjugate with the antibody component is effected by oxidizing the carbohydrate portion of the antibody component and reacting the resulting aldehyde (and ketone) carbonyls with amine groups remaining on the carrier after loading with a drug, toxin, chelator, immunomodulator, boron addend, or other therapeutic agent. Alternatively, an intermediate conjugate can be attached to an oxidized antibody component via amine groups that have been introduced in the intermediate conjugate after loading with the therapeutic agent. Oxidation is conveniently effected either chemically, e.g., with NaIO4 or other glycolytic reagent, or enzymatically, e.g., with neuraminidase and galactose oxidase. In the case of an aminodextran carrier, not all of the amines of the aminodextran are typically used for loading a therapeutic agent. The remaining amines of aminodextran condense with the oxidized antibody component to form Schiff base adducts, which are then reductively stabilized, normally with a borohydride reducing agent.

[3158] Analogous procedures are used to produce other immunoconjugates according to the invention. Loaded polypeptide carriers preferably have free lysine residues remaining for condensation with the oxidized carbohydrate portion of an antibody component. Carboxyls on the polypeptide carrier can, if necessary, be converted to amines by, e.g., activation with DCC and reaction with an excess of a diamme.

[3159] The final immunoconjugate is purified using conventional techniques, such as sizing chromatography on Sephacryl S-300 or affinity chromatography using one or more CD84Hy epitopes. Alternatively, immunoconjugates can be prepared by directly conjugating an antibody component with a therapeutic agent. The general procedure is analogous to the indirect method of conjugation except that a therapeutic agent is directly attached to an oxidized antibody component. It will be appreciated that other therapeutic agents can be substituted for the chelators described herein. Those of skill in the art will be able to devise conjugation schemes without undue experimentation.

[3160] As a further illustration, a therapeutic agent can be attached at the hinge region of a reduced antibody component via disulfide bond formation. For example, the tetanus toxoid peptides can be constructed with a single cysteine residue that is used to attach the peptide to an antibody component. As an alternative, such peptides can be attached to the antibody component using a heterobifunctional cross-linker, such as N-succinyl 3-(2-pyridyldithio)propionate (SPDP). Yu et al., Int. J. Cancer 56:244 (1994). General techniques for such conjugation are well-known in the art. See, for example, Wong, Chemistry Of Protein Conjugation and Cross-Linking (CRC Press 1991); Upeslacis et al., “Modification of Antibodies by Chemical Methods,” in Monoclonal Antibodies: Principles and Applications, Birch et al. (eds.), pages 187-230 (Wiley-Liss, Inc. 1995); Price, “Production and Characterization of Synthetic Peptide-De-rived Antibodies,” in Monoclonal Antibodies: Production, Engineering and Clinical Application, Ritter et al. (eds.), pages 60-84 (Cambridge University Press 1995).

[3161] Conjugates of the antibody and cytotoxic agent are made using a variety of bifunctional protein coupling agents such as N-succinimidyl-3-(2-pyridyldithiol) propionate (SPDP), iminothiolane (IT), bifunctional derivatives of imidoesters (such as dimethyl adipimidate HCL), active esters (such as disuccinimidyl suberate), aldehydes (such as glutareldehyde), bis-azido compounds (such as bis (p-azido-benzoyl) hexanediamine), bis-diazonium derivatives (such as bis-(p-diazoniumbenzoyl)-ethylenediamine), diisocyanates (such as tolyene 2,6-diisocyanate), and bis-active fluorine compounds (such as 1,5-difluoro-2,4-dinitrobenzene). For example, a ricin immunotoxin can be prepared as described in Vitetta et al., Science 238: 1098 (1987). Carbon-14-labeled 1-isothiocyanatobenzyl-3-methyldiethylene triaminepentaacetic acid (MX-DTPA) is an exemplary chelating agent for conjugation of radionuclide to the antibody (see, e.g., WO 94/11026).

[3162] As described above, carbohydrate moieties in the Fe region of an antibody can be used to conjugate a therapeutic agent. However, the Fe region may be absent if an antibody fragment is used as the antibody component of the immunoconjugate. Nevertheless, it is possible to introduce a carbohydrate moiety into the light chain variable region of an antibody or antibody fragment. See, for example, Leung et al., J. Immunol. 154:5919 (1995); Hansen et al., U.S. Pat. No. 5,443,953. The engineered carbohydrate moiety is then used to attach a therapeutic agent. In addition, those of skill in the art will recognize numerous possible variations of the conjugation methods. For example, the carbohydrate moiety can be used to attach polyethyleneglycol in order to extend the half-life of an intact antibody, or antigen-binding fragment thereof, in blood, lymph, or other extracellular fluids. Moreover, it is possible to construct a “divalent immunoconjugate” by attaching therapeutic agents to a carbohydrate moiety and to a free sulfhydryl group. Such a free sulfhydryl group may be located in the hinge region of the antibody component.

### Pharmaceutical Compositions and Medicaments

[3163] The antibodies or antigen binding fragment thereof, or the compositions, described herein can be used screening for a disease, detecting a presence or a severity of a disease, providing prognosis of a disease, monitoring disease progression or relapse, as well as assessment of treatment efficacy and/or relapse of a disease, disorder or condition, as well as selecting a therapy and/or a treatment for a disease, optimization of a given therapy for a disease, monitoring the treatment of a disease, and/or predicting the suitability of a therapy for specific patients or subpopulations or determining the appropriate dosing of a therapeutic product in patients or subpopulations. In some embodiments, the disease is cancer.

[3164] For the clinical use of the methods described herein, administration of the antibodies or antigen binding fragments thereof of the present disclosure can include formulation into pharmaceutical compositions, pharmaceutical formulations, or medicaments, for administration, e.g., subcutaneous, intravenous, intradermal, intraperitoneal, oral, intramuscular, intracranial or other routs of administration. In some embodiments, the antibodies or antigen binding fragments thereof, described herein can be administered along with any pharmaceutically acceptable carrier, excipient, or diluent, which results in an effective treatment in the subject. Thus, in one aspect, the present disclosure provides pharmaceutical compositions comprising one or more antibodies or antigen binding fragment thereof, described herein, in combination with one or more pharmaceutically acceptable carrier, excipient, or diluent.

[3165] The phrase “pharmaceutically acceptable” refers to those compounds, materials, compositions, and/or dosage forms which are, within the scope of sound medical judgment, suitable for use in contact with the tissues of human beings and animals without excessive toxicity, irritation, allergic response, or other problem or complication, commensurate with a reasonable benefit/risk ratio. The phrase “pharmaceutically acceptable carrier” as used herein means a pharmaceutically acceptable material, composition or vehicle, such as a liquid or solid filler, diluent, excipient, solvent, media, encapsulating material, manufacturing aid (e.g., lubricant, talc magnesium, calcium or zinc stearate, or steric acid), or solvent encapsulating material, involved in maintaining the stability, solubility, or activity of, an antibody or antigen binding fragment thereof of the present disclosure. Examples include, but are not limited to, any of a number of standard pharmaceutical carriers such as sterile phosphate buffered saline solutions, bacteriostatic water, and the like. A variety of aqueous carriers may be used, e.g., water, buffered water, 0.4% saline, 0.3% glycine and the like, and may include other proteins for enhanced stability, such as albumin, lipoprotein, globulin, etc., subjected to mild chemical modifications or the like. Each carrier must be “acceptable” in the sense of being compatible with the other ingredients of the formulation and not injurious to the patient. The terms “excipient”, “carrier”, “pharmaceutically acceptable carrier”, or the like are used interchangeably herein. The compositions of the present disclosure may further comprise one or more pharmaceutically acceptable carriers, excipients, and other agents that are incorporated into formulations to provide improved transfer, delivery, tolerance, and the like (herein collectively referred to as “pharmaceutically acceptable carriers or diluents”). A multitude of appropriate formulations can be found in the formulary known to all pharmaceutical chemists: Remington's Pharmaceutical Sciences, Mack Publishing Company, Easton, Pa. These formulations include, for example, powders, pastes, ointments, jellies, waxes, oils, lipids, lipid (cationic or anionic) containing vesicles (such as LIPOFECTIN™), DNA conjugates, anhydrous absorption pastes, oil-in-water and water-in-oil emulsions, emulsions carbowax (polyethylene glycols of various molecular weights), semi-solid gels, and semi-solid mixtures containing carbowax. See also Powell et al. “Compendium of excipients for parenteral formulations” PDA, 1998, J Pharm Sci Technol 52:238-311.

[3166] Acceptable carriers, excipients, or stabilizers are nontoxic to recipients at the dosages and concentrations employed, and include buffers such as phosphate, citrate, and other organic acids; antioxidants including ascorbic acid and methionine; preservatives (such as octadecyldimethylbenzyl ammonium chloride; hexamethonium chloride; benzalkonium chloride, benzethonium chloride; phenol, butyl or benzyl alcohol; alkyl parabens such as methyl or propyl paraben; catechol; resorcinol; cyclohexanol; 3-pentanol; and m-cresol); low molecular weight (less than about 10 residues) polypeptides; proteins, such as serum albumin, gelatin, or immunoglobulins; hydrophilic polymers such as polyvinylpyrrolidone; amino acids such as glycine, glutamine, asparagine, histidine, arginine, or lysine; monosaccharides, disaccharides, and other carbohydrates including glucose, mannose, or dextrins; chelating agents such as EDTA; sugars such as sucrose, mannitol, trehalose or sorbitol; salt-forming counter-ions such as sodium; metal complexes (e.g., Zn-protein complexes); and/or non-ionic surfactants such as TWEEN®, PLURONICS® or polyethylene glycol (PEG).

[3167] Optionally, the formulations comprising the compositions described herein contain a pharmaceutically acceptable salt, typically, e.g., sodium chloride, and preferably at about physiological concentrations. Optionally, the formulations of the invention can contain a pharmaceutically acceptable preservative. In some embodiments the preservative concentration ranges from 0.1 to 2.0%, typically v/v. Suitable preservatives include those known in the pharmaceutical arts. Benzyl alcohol, phenol, m-cresol, methylparaben, and propylparaben are examples of preservatives. Optionally, the formulations of the invention can include a pharmaceutically acceptable surfactant at a concentration of 0.005 to 0.02%.

[3168] The compositions described herein can be specially formulated for administration of the antibody or antigen binding fragment thereof to a subject in solid, liquid or gel form, including those adapted for the following: (1) parenteral administration, for example, by subcutaneous, intramuscular, intravenous or epidural injection as, for example, a sterile solution or suspension, or sustained-release formulation; (2) topical application, for example, as a cream, ointment, or a controlled-release patch or spray applied to the skin; (3) intravaginally or intrarectally, for example, as a pessary, cream or foam; (4) ocularly; (5) transdermally; (6) transmucosally; or (7) nasally. Additionally, an antibody or antigen binding fragment thereof, or compositions of the present disclosure can be implanted into a patient or injected using a drug delivery system. See, e.g., Urquhart et al., 24 Ann. Rev. Pharmacol. Toxicol. 199 (1984); Controlled Release of Pesticides & Pharmaceuticals (Lewis, ed., Plenum Press, New York, 1981); U.S. Pat. Nos. 3,773,919, 3,270,960.

[3169] The compositions disclosed herein, comprising an antibody or antigen binding fragment, described herein, can also contain more than one active compound as necessary for the particular indication being treated, preferably those with complementary activities that do not adversely affect each other. For example, the composition can further comprise a cytotoxic agent, cytokine, growth inhibitory agent and/or an angiogenesis inhibitor such as a VEGFR antagonist. Such molecules are suitably present in combination in amounts that are effective for the purpose intended. The active ingredients of the compositions comprising an antibody or antigen binding fragment thereof described herein can also be entrapped in microcapsules prepared, for example, by coacervation techniques or by interfacial polymerization, for example, hydroxymethylcellulose or gelatin-microcapsules and poly-(methylmethacylate) microcapsules, respectively, in colloidal drug delivery systems (for example, liposomes, albumin microspheres, microparticle, microemulsions, nano-particles and nanocapsules) or in macroemulsions. Such techniques are disclosed in Remington's Pharmaceutical Sciences (16th ed., Osol, ed., 1980). The pharmaceutical composition can be also delivered in a vesicle, in particular a liposome (see Langer 1990 Science 249:1527-1533; Treat et al. (1989) in Liposomes in the Therapy of Infectious Disease and Cancer, Lopez-Berestein and Fidler (eds.), Liss, New York, pp. 353-365; Lopez-Berestein, ibid., pp. 317-327; see generally ibid.). Liposomes include emulsions, foams, micelles, insoluble monolayers, phospholipid dispersions, lamellar layers and the like, and can serve as vehicles to target the M-CSF antibodies to a particular tissue as well as to increase the half-life of the composition. A variety of methods are available for preparing liposomes, as described in, e.g., U.S. Pat. Nos. 4,837,028 and 5,019,369, which patents are incorporated herein by reference.

[3170] Liposomes containing the antibody are prepared by methods known in the art, such as described in Epstein et al., Proc. Natl. Acad. Sci. USA 82: 3688 (1985); Hwang et al., Proc. Natl Acad. Sci. USA 77: 4030 (1980); and U.S. Pat. Nos. 4,485,045 and 4,544,545. Liposomes with enhanced circulation time are disclosed in U.S. Pat. No. 5,013,556. Particularly useful liposomes can be generated by the reverse phase evaporation method with a lipid composition comprising phosphatidylcholine, cholesterol and PEG-derivatized phosphatidylethanolamine (PEG-PE). Liposomes are extruded through filters of defined pore size to yield liposomes with the desired diameter. Fab′ fragments of the antibody of the present invention can be conjugated to the liposomes as described in Martin et al., J. Biol. Chem. 257: 286-288 (1982) via a disulfide interchange reaction. A chemotherapeutic agent (such as Doxorubicin) is optionally contained within the liposome [see, e.g., Gabizon et al., J. National Cancer Inst. 81(19): 1484 (1989)].

[3171] In some embodiments, sustained-release preparations can be used. Suitable examples of sustained-release preparations include semipermeable matrices of solid hydrophobic polymers containing an antibody or antigen binding fragment of the present disclosure, in which the matrices are in the form of shaped articles, e.g., films, or microcapsule. Examples of sustained-release matrices include polyesters, hydrogels (for example, poly(2-hydroxyethyl-methacrylate), or poly(vinylalcohol)), polylactides (U.S. Pat. No. 3,773,919), copolymers of L-glutamic acid and y ethyl-L-glutamate, non-degradable ethylene-vinyl acetate, degradable lactic acid-glycolic acid copolymers such as the LUPRON DEPOT™ (injectable microspheres composed of lactic acid-glycolic acid copolymer and leuprolide acetate), and poly-D-(−)-3-hydroxybutyric acid. While polymers such as ethylene-vinyl acetate and lactic acid-glycolic acid enable release of molecules for over 100 days, certain hydrogels release proteins for shorter time periods. When encapsulated antibodies remain in the body for a long time, they can denature or aggregate as a result of exposure to moisture at 37° C., resulting in a loss of biological activity and possible changes in immunogenicity. Rational strategies can be devised for stabilization depending on the mechanism involved. For example, if the aggregation mechanism is discovered to be intermolecular S—S bond formation through thio-disulfide interchange, stabilization can be achieved by modifying sulfhydryl residues, lyophilizing from acidic solutions, controlling moisture content, using appropriate additives, and developing specific polymer matrix compositions. In certain situations, the pharmaceutical composition can be delivered in a controlled release system. In one embodiment, a pump may be used (see Langer, supra; Sefton 1987 CRC Crit. Ref Biomed. Eng. 14:201). In another embodiment, polymeric materials can be used. In yet another embodiment, a controlled release system can be placed in proximity of the composition's target, thus requiring only a fraction of the systemic dose (see, e.g., Goodson, 1984, in Medical Applications of Controlled Release, supra, vol. 2, pp. 115-138).

[3172] A pharmaceutical composition of the present disclosure can be delivered, e.g., subcutaneously or intravenously with a standard needle and syringe. In addition, with respect to subcutaneous delivery, a pen delivery device readily has applications in delivering a pharmaceutical composition of the present invention. Such a pen delivery device can be reusable or disposable. A reusable pen delivery device generally utilizes a replaceable cartridge that contains a pharmaceutical composition. Once all of the pharmaceutical composition within the cartridge has been administered and the cartridge is empty, the empty cartridge can readily be discarded and replaced with a new cartridge that contains the pharmaceutical composition. The pen delivery device can then be reused. In a disposable pen delivery device, there is no replaceable cartridge. Rather, the disposable pen delivery device comes prefilled with the pharmaceutical composition held in a reservoir within the device. Once the reservoir is emptied of the pharmaceutical composition, the entire device is discarded. Numerous reusable pen and autoinjector delivery devices have applications in the subcutaneous delivery of a pharmaceutical composition of the present invention. Examples include, but certainly are not limited to AUTOPEN™ (Owen Mumford, Inc., Woodstock, UK), DISETRONIC™ pen (Disetronic Medical Systems, Burghdorf, Switzerland), HUMALOG MIX 75/25™ pen, HUMALOG™ pen, HUMALIN70130™ pen (Eli Lilly and Co., Indianapolis, Ind.), NOVOPEN™ I, II and III (Novo Nordisk, Copenhagen, Denmark), NOVOPEN JUNIOR™ (Novo Nordisk, Copenhagen, Denmark), BD™ pen (Becton Dickinson, Franklin Lakes, N.J.), OPTIPEN™, OPTIPEN PRO™, OPTIPEN STARLET™, and OPTICLIK™ (Sanofi-Aventis, Frankfurt, Germany), to name only a few. Examples of disposable pen delivery devices having applications in subcutaneous delivery of a pharmaceutical composition include, but certainly are not limited to the SOLOSTAR™ pen (Sanofi-Aventis), the FLEXPEN™ (Novo Nordisk), and the KWIKPEN™ (Eli Lilly).

[3173] The injectable preparations may include dosage forms for intravenous, subcutaneous, intracutaneous and intramuscular injections, drip infusions, etc. These injectable preparations may be prepared by methods publicly known. For example, the injectable preparations may be prepared, e.g., by dissolving, suspending or emulsifying the antibody or its salt described above in a sterile aqueous medium or an oily medium conventionally used for injections. As the aqueous medium for injections, there are, for example, physiological saline, an isotonic solution containing glucose and other auxiliary agents, etc., which may be used in combination with an appropriate solubilizing agent such as an alcohol (e.g., ethanol), a polyalcohol (e.g., propylene glycol, polyethylene glycol), a nonionic surfactant [e.g., polysorbate 80, HCO-50 (polyoxyethylene (50 mol) adduct of hydrogenated castor oil)], etc. As the oily medium, there are employed, e.g., sesame oil, soybean oil, etc., which may be used in combination with a solubilizing agent such as benzyl benzoate, benzyl alcohol, etc. The injection thus prepared is preferably filled in an appropriate ampoule.

[3174] Compositions of the present disclosure can be in the form of, for example, granules, powders, tablets, capsules, syrup, suppositories, injections, emulsions, elixirs, suspensions or solutions. The amount of the aforesaid antibody contained can be about 5 to about 500 mg per dosage form in a unit dose; especially in the form of injection, it is preferred that the aforesaid antibody is contained in about 5 to about 100 mg and in about 10 to about 250 mg for the other dosage forms.

[3175] For oral, buccal, and sublingual administration, powders, suspensions, granules, tablets, pills, capsules, gelcaps, and caplets are acceptable as solid dosage forms. These can be prepared, for example, by mixing one or more compounds of the instant invention, or pharmaceutically acceptable salts or tautomers thereof, with at least one additive such as a starch or other additive. Suitable additives are sucrose, lactose, cellulose sugar, mannitol, maltitol, dextran, starch, agar, alginates, chitins, chitosans, pectins, tragacanth gum, gum arabic, gelatins, collagens, casein, albumin, synthetic or semi-synthetic polymers or glycerides. Optionally, oral dosage forms can contain other ingredients to aid in administration, such as an inactive diluent, or lubricants such as magnesium stearate, or preservatives such as paraben or sorbic acid, or anti-oxidants such as ascorbic acid, tocopherol or cysteine, a disintegrating agent, binders, thickeners, buffers, sweeteners, flavoring agents or perfuming agents. Tablets and pills may be further treated with suitable coating materials known in the art.

[3176] Liquid dosage forms for oral administration may be in the form of pharmaceutically acceptable emulsions, syrups, elixirs, suspensions, and solutions, which may contain an inactive diluent, such as water. Pharmaceutical formulations and medicaments may be prepared as liquid suspensions or solutions using a sterile liquid, such as, but not limited to, an oil, water, an alcohol, and combinations of these. Pharmaceutically suitable surfactants, suspending agents, emulsifying agents, may be added for oral or par-enteral administration.

[3177] As noted above, suspensions may include oils. Such oils include, but are not limited to, peanut oil, sesame oil, cottonseed oil, corn oil and olive oil. Suspension preparation may also contain esters of fatty acids such as ethyl oleate, isopropyl myristate, fatty acid glycerides and acetylated fatty acid glycerides. Suspension formulations may include alcohols, such as, but not limited to, ethanol, iso-propyl alcohol, hexadecyl alcohol, glycerol and propylene glycol. Ethers, such as but not limited to, poly(ethyleneglycol), petroleum hydrocarbons such as mineral oil and petrolatum; and water may also be used in suspension formulations.

[3178] For nasal administration, the pharmaceutical formulations and medicaments may be a spray or aerosol containing an appropriate solvent(s) and optionally other compounds such as, but not limited to, stabilizers, antimicrobial agents, antioxidants, pH modifiers, surfactants, bio-availability modifiers and combinations of these. A propellant for an aerosol formulation may include compressed air, nitrogen, carbon dioxide, or a hydrocarbon based low boiling solvent.

[3179] Injectable dosage forms generally include aqueous suspensions or oil suspensions which may be prepared using a suitable dispersant or wetting agent and a suspending agent. Injectable forms may be in solution phase or in the form of a suspension, which is prepared with a solvent or diluent. Acceptable solvents or vehicles include sterilized water, Ringer's solution, or an isotonic aqueous saline solution. Alternatively, sterile oils may be employed as solvents or suspending agents. Preferably, the oil or fatty acid is non-volatile, including natural or synthetic oils, fatty acids, mono-, di-, or tri-glycerides.

[3180] For injection, the pharmaceutical formulation and/or medicament may be a powder suitable for reconstitution with an appropriate solution as described above. Examples of these include, but are not limited to, freeze dried, rotary dried or spray dried powders, amorphous powders, granules, precipitates, or particulates. For injection, the formulations may optionally contain stabilizers, pH modifiers, surfactants, bioavailability modifiers and combinations of these.

[3181] For rectal administration, the pharmaceutical formulations and medicaments may be in the form of a suppository, an ointment, an enema, a tablet or a cream for release of compound in the intestines, sigmoid flexure and/or rectum. Rectal suppositories are prepared by mixing one or more compounds of the instant invention, or pharmaceutically acceptable salts or tautomers of the compound, with acceptable vehicles, for example, cocoa butter or polyethylene glycol, which is present in a solid phase at normal storing temperatures, and present in a liquid phase at those temperatures suitable to release a drug inside the body, such as in the rectum. Oils may also be employed in the preparation of formulations of the soft gelatin type and suppositories. Water, saline, aqueous dextrose and related sugar solutions, and glycerols may be employed in the preparation of suspension formulations which may also contain suspending agents such as pectins, carbomers, methyl cellulose, hydroxypropyl cellulose or carboxymethyl cellulose, as well as buffers and preservatives.

[3182] The concentration of an antibody or an antigen binding fragment thereof in these compositions can vary widely, i.e., from less than about 10%, usually at least about 25% to as much as 75% or 90% by weight and will be selected primarily by fluid volumes, viscosities, etc., in accordance with the particular mode of administration selected. Actual methods for preparing orally, topically and parenterally administrable compositions will be known or apparent to those skilled in the art and are described in detail in, for example, Remington's Pharmaceutical Science, 19th ed., Mack Publishing Co., Easton, Pa. (1995), which is incorporated herein by reference.

[3183] In another embodiment of the invention, an article of manufacture containing materials useful for the treatment of the diseases, disorders or conditions described above is provided, including for treatment of cancer. The article of manufacture comprises a container and a label. Suitable containers include, for example, bottles, vials, syringes, and test tubes. The containers may be formed from a variety of materials such as glass or plastic. The container holds a composition which is effective for treating the condition and may have a sterile access port (for example the container may be an intravenous solution bag or a vial having a stopper pierceable by a hypodermic injection needle). The active agent in the composition is the antibody of the invention. The label on or associated with, the container indicates that the composition is used for treating the condition of choice. The article of manufacture may further comprise a second container comprising a pharmaceutically-acceptable buffer, such as phosphate-buffered saline, Ringer's solution and dextrose solution. It may further include other materials desirable from a commercial and user stand-point, including other buffers, diluents, filters, needles, syringes, and package inserts with instructions for use.

[3184] Pharmaceutical compositions and medicaments described herein are useful in treating a cancerous disease.

### Methods of Treatment

[3185] The disclosure provides methods for treatment or prevention of a cancer, including, but not limited to, neoplasms, tumors, metastases, or any disease or disorder characterized by uncontrolled cell growth, by the administration of an antibody or antigen-binding fragment thereof disclosed herein, to a patient in an amount effective to treat the patient.

### Treatment Terminology

[3186] As used herein, a “subject”, “patient”, “individual” and like terms are used interchangeably and refers to a vertebrate, a mammal, a primate, or a human. Mammals include, without limitation, humans, primates, rodents, wild or domesticated animals, including feral animals, farm animals, sport animals, and pets. Primates include, for example, chimpanzees, cynomologous monkeys, spider monkeys, and macaques, e.g., Rhesus. Rodents include, for example, mice, rats, woodchucks, ferrets, rabbits and hamsters. Domestic and game animals include, for example, cows, horses, pigs, deer, bison, buffalo, feline species, e.g., domestic cat, and canine species, e.g., dog, fox, wolf, avian species, e.g., chicken, emu, ostrich, and fish, e.g., trout, catfish and salmon. The terms, “individual,” “patient” and “subject” are used interchangeably herein. A subject can be male or female.

[3187] The term “in need thereof” when used in the context of a therapeutic or prophylactic treatment, means having a disease, being diagnosed with a disease, or being in need of preventing a disease, e.g., for one at risk of developing the disease. Thus, a subject in need thereof can be a subject in need of treating or preventing a disease.

[3188] As used herein, the term “administering,” refers to the placement of a compound (e.g., an antibody or antigen binding fragment thereof as disclosed herein) into a subject by a method or route that results in at least partial delivery of the agent at a desired site. Pharmaceutical compositions comprising an antibody or antigen binding fragment thereof, disclosed herein can be administered by any appropriate route which results in an effective treatment in the subject, including but not limited to intravenous, intraarterial, injection or infusion directly into a tissue parenchyma, etc. Where necessary or desired, administration can include, for example, intracerebroventricular (“icv”) administration, intranasal administration, intracranial administration, intracelial administration, intracerebellar administration, or intrathecal administration.

[3189] In some embodiments, the subject is a mammal. The mammal can be a human, non-human primate, mouse, rat, dog, cat, horse, or cow, but is not limited to these examples. Mammals other than humans can be advantageously used as subjects that represent animal models of conditions or disorders associated with uncontrolled cell growth (e.g., a cancer). Non-limiting examples include murine tumor models. In addition, the compositions and methods described herein can be used to treat domesticated animals and/or pets. A subject can be one who has been previously diagnosed with or identified as suffering from a cancer. A subject can be one who is diagnosed and currently being treated for, or seeking treatment, monitoring, adjustment or modification of an existing therapeutic treatment, or is at a risk of developing a given disorder (e.g., cancer).

[3190] The terms “disease”, “disorder”, or “condition” are used interchangeably herein, refer to any alternation in state of the body or of some of the organs, interrupting or disturbing the performance of the functions and/or causing symptoms such as discomfort, dysfunction, distress, or even death to the person afflicted or those in contact with a person. A disease or disorder can also be related to a distemper, ailing, ailment, malady, disorder, sickness, illness, complaint, or affectation.

[3191] The term “cancer” refers to a disease characterized by the rapid and uncontrolled growth of aberrant cells. Cancer cells can spread locally or through the bloodstream and lymphatic system to other parts of the body. The term “anti-tumor effect” refers to a biological effect which can be manifested by various means, including but not limited to, e.g., a decrease in tumor volume, a decrease in the number of tumor cells, a decrease in the number of metastases, an increase in life expectancy, decrease in tumor cell proliferation, decrease in tumor cell survival, or amelioration of various physiological symptoms associated with the cancerous condition. An “anti-tumor effect” can also be manifested by the ability of the peptides, polynucleotides, cells and antibodies of the invention in prevention of the occurrence of tumor in the first place.

### Exemplary Cancers

[3192] In some embodiments, the cancer can be a carcinoma, a sarcoma, a lymphoma, a leukemia, germ cell tumor, a blastoma, or a melanoma. In some embodiments, the cancer can be a cancer from the bladder, blood, bone, bone marrow, brain, breast, colon, esophagus, gastrointestine, gum, head, kidney, liver, lung, nasopharynx, neck, ovary, prostate, skin, stomach, testis, tongue, or uterus. In some embodiments, the cancer may be a neoplasm, malignant carcinoma, carcinoma, undifferentiated, giant and spindle cell carcinoma, small cell carcinoma, papillary carcinoma, squamous cell carcinoma, lymphoepithelial carcinoma, basal cell carcinoma, pilomatrix carcinoma, transitional cell carcinoma, papillary transitional cell carcinoma, adenocarcinoma; gastrinoma, cholangiocarcinoma, hepatocellular carcinoma, combined hepatocellular carcinoma and cholangiocarcinoma, trabecular adenocarcinoma, adenoid cystic carcinoma, adenocarcinoma in adenomatous polyp, adenocarcinoma, Familial adenomatous polyposis, solid carcinoma, carcinoid tumor, branchiolo-alveolar adenocarcinoma, papillary adenocarcinoma, chromophobe carcinoma, acidophil carcinoma, oxyphilic adenocarcinoma, basophil carcinoma, clear cell adenocarcinoma, granular cell carcinoma, follicular adenocarcinoma, papillary and follicular adenocarcinoma, nonencapsulating sclerosing carcinoma, adrenal cortical carcinoma, endometroid carcinoma, skin appendage carcinoma, apocrine adenocarcinoma, sebaceous adenocarcinoma, ceruminous adenocarcinoma, mucoepidermoid carcinoma, cystadenocarcinoma, papillary cystadenocarcinoma, papillary serous cystadenocarcinoma, mucinous cystadenocarcinoma, mucinous adenocarcinoma, signet ring cell carcinoma, infiltrating duct carcinoma, medullary carcinoma, lobular carcinoma, inflammatory carcinoma, Paget's disease, mammary acinar cell carcinoma, adenosquamous carcinoma, adenocarcinoma w/squamous metaplasia, thymoma, ovarian stromal tumor, thecoma, granulosa cell tumor, androblastoma, sertoli cell carcinoma, Leydig cell tumor, lipid cell tumor, paraganglioma, extra-mammary paraganglioma, pheochromocytoma, glomangiosarcoma, melanoma, Lentigo maligna, Lentigo maligna melanoma, Acral lentiginous melanoma, mucosal melanoma, nodular melanoma, polypoid melanoma, desmoplastic melanoma, skin cutaneous melanoma, amelanotic melanoma, superficial spreading melanoma, melanoma in giant pigmented nevus, epithelioid cell melanoma, blue nevus, sarcoma, fibrosarcoma, fibrous histiocytoma, myxosarcoma, liposarcoma, leiomyosarcoma, rhabdomyosarcoma, embryonal rhabdomyosarcoma, alveolar rhabdomyosarcoma, stromal sarcoma, mixed tumor, mullerian mixed tumor, nephroblastoma, hepatoblastoma, carcinosarcoma, mesenchymoma, Brenner tumor, phyllodes tumor, synovial sarcoma, mesothelioma, dysgerminoma, embryonal carcinoma, teratoma, struma ovarii, choriocarcinoma, mesonephroma, hemangiosarcoma, hemangioendothelioma, Kaposi's sarcoma, hemangiopericytoma, lymphangiosarcoma, osteosarcoma, juxtacortical osteosarcoma, chondrosarcoma, chondroblastoma, mesenchymal chondrosarcoma, giant cell tumor of bone, Ewing's sarcoma, odontogenic tumor, ameloblastic odontosarcoma, ameloblastoma, ameloblastic fibrosarcoma, pinealoma, chordoma glioma, ependymoma, astrocytoma, protoplasmic astrocytoma, fibrillary astrocytoma, astroblastoma, glioblastoma, oligodendroglioma, oligodendroblastoma, primitive neuroectodermal, cerebellar sarcoma, ganglioneuroblastoma, neuroblastoma, retinoblastoma, olfactory neurogenic tumor, meningioma, neurofibrosarcoma, neurilemmoma, granular cell tumor, malignant lymphoma, Hodgkin's disease, Hodgkin's, paragranuloma, lymphoma, small lymphocytic, malignant lymphoma, diffuse large B-cell lymphoma, follicular lymphoma, mycosis fungoides, other specified non-Hodgkin's lymphomas, histiocytosis, multiple myeloma, mast cell sarcoma, immunoproliferative small intestinal disease, leukemia, lymphoid leukemia, plasma cell leukemia, erythroleukemia, lymphosarcoma cell leukemia, myeloid leukemia, basophilic leukemia, eosinophilic leukemia, monocytic leukemia, mast cell leukemia, megakaryoblastic leukemia, myeloid sarcoma, hairy cell leukemia, or a combination thereof. In some embodiments, the cancer is lung cancer. In some embodiments, the lung cancer is non-small cell lung carcinoma, small-cell lung carcinoma, lung adenocarcinoma, lung squamous cell carcinoma, large cell carcinoma, carcinoid tumors, bronchial gland carcinomas, carcinosarcomas, pulmonary blastomas, giant and spindle cell carcinomas, and sarcomatoid carcinomas. In some embodiments, the lung cancer is stage 0, IA, IB, IIA, IIB, IIIA, IIIB, or IV. In some embodiments, the lung cancer is limited stage or extensive stage cancer. In some embodiments, the cancer is T1a, T1b, T1c, T2a, T2v, T3 size, T3 inv, T3 centr, T3 satell, T4 inv, T4 ipis, N1, or N2.

Combination Treatment with a Second Therapeutic Agent

[3193] An antibody of the present disclosure may be administered to a subject per se or in the form of a pharmaceutical composition disclosed herein for the treatment or prevention of diseases, e.g., cancer. The antibodies or antigen binding fragment thereof or the compositions described herein may be administered alone or in combination a second therapeutic agent or therapy useful for treating cancer. Examples of second therapy useful for treating cancer can include, but not limited to radiotherapy, cryotherapy, antibody therapy, chemotherapy, photodynamic therapy, surgery, hormonal therapy, immunotherapy, cytokine therapy, or a combination therapy with conventional drugs. In some embodiments, a second therapeutic agent, can be a cytotoxic drug, tumor vaccine, a peptide, a pepti-body, a small molecule, a cytotoxic agent, a cytostatic agent, immunological modifier, interferon, interleukin, immunostimulatory growth hormone, cytokine, vitamin, mineral, aromatase inhibitor, RNAi, Histone Deacetylase Inhibitor, proteasome inhibitor, a cancer chemotherapeutic agent, Tregs targeting agent, another antibody, Immunostimulatory antibody, a NSAID, a corticosteroid, a dietary supplement such as an antioxidant, cisplatin, ifosfamide, paclitaxel, taxanes, topoisomerase I inhibitors (e.g., CPT-11, topotecan, 9-AC, and GG-211), gemcitabine, vinorelbine, oxaliplatin, 5-fluorouracil (5-FU), leucovorin, vinorelbine, temodal, and taxol. In some embodiments, the second therapeutic agent is a chemotherapeutic agent selected from a group consisting of platinum based compounds, antibiotics with anti-cancer activity, Anthracyclines, Anthracenediones, alkylating agents, antimetabolites, Antimitotic agents, Taxanes, Taxoids, microtubule inhibitors, Vinca alkaloids, Folate antagonists, Topoisomerase inhibitors, Antiestrogens, Antiandrogens, Aromatase inhibitors, GnRh analogs, and inhibitors of 5α-reductase, biphosphonates.

[3194] A “cytotoxic agent” refers to an agent that has a cytotoxic and/or cytostatic effect on a cell. A “cytotoxic effect” refers to the depletion, elimination and/or the killing of a target cell(s). A “cytostatic effect” refers to the inhibition of cell proliferation.

[3195] In some embodiments, the second therapeutic agent can be a PD-1 inhibitor, histone deacetylase (HDAC) inhibitor, proteasome inhibitor, mTOR pathway inhibitor, JAK2 inhibitor, tyrosine kinase inhibitor (TKIs), PI3K inhibitor, Protein kinase inhibitor, Inhibitor of serine/threonine kinases, inhibitor of intracellular signaling, inhibitors of Ras/Raf signaling, MEK inhibitor, AKT inhibitor, inhibitor of survival signaling proteins, cyclin dependent kinase inhibitor, therapeutic monoclonal antibodies, TRAIL pathway agonist, anti-angiogenic agent, metalloproteinase inhibitor, cathepsin inhibitor, inhibitor of urokinase plasminogen activator receptor function, immunoconjugate, antibody drug conjugate, antibody fragments, bispecific antibodies, bispecific T cell engagers (BiTEs). In some embodiments, the another antibody is selected from cetuximab, panitumumab, nimotuzumab, trastuzumab, pertuzumab, rituximab, ofatumumab, veltuzumab, alemtuzumab, labetuzumab, adecatumumab, oregovomab, onartuzumab; apomab, mapatumumab, lexatumumab, conatumumab, tigatuzumab, catumaxomab, blinatumomab, ibritumomab triuxetan, tositumomab, brentuximab vedotin, gemtuzumab ozogamicin, clivatuzumab tetraxetan, pemtumomab, trastuzumab emtansine, bevacizumab, etaracizumab, volociximab, ramucirumab, aflibercept. In yet another embodiment, the second therapeutic agent can be antibodies currently used for the treatment of cancer. Examples of such antibodies include, but are not limited to, HERCEPTIN®, RETUXAN®, OvaRex, Panorex, BEC2, IMC-C225, Vitaxin, Campath I/H, Smart MI95, LymphoCide, Smart I D10, and Oncolym. In some embodiments, the another antibody is an immunostimulatory antibody is selected from antagonistic antibodies targeting one or more of CTLA4, PD-1, PDL-1, LAG-3, TIM-3, BTLA, B7-H4, B7-H3, VISTA, and/or Agonistic antibodies targeting one or more of CD40, CD137, OX40, GITR, CD27, CD28, ICOS or a combination thereof. In some embodiments, the second therapeutic agent targeting immunosuppressive cells Tregs and/or MDSCs is selected from antimitotic drugs, cyclophosphamide, gemcitabine, mitoxantrone, fludarabine, thalidomide, thalidomide derivatives, COX-2 inhibitors, depleting or killing antibodies that directly target Tregs through recognition of Treg cell surface receptors, anti-CD25 daclizumab, basiliximab, ligand-directed toxins, denileukin diftitox (ONTAK®)—a fusion protein of human IL-2 and diphtheria toxin, or LMB-2—a fusion between an scFv against CD25 and the Pseudomonas exotoxin, antibodies targeting Treg cell surface receptors, TLR modulators, agents that interfere with the adenosinergic pathway, ectonucleotidase inhibitors, or inhibitors of the A2A adenosine receptor, TGF-β inhibitors, chemokine receptor inhibitors, retinoic acid, all-trans retinoic acid (ATRA), Vitamin D3, phosphodiesterase 5 inhibitors, sildenafil, ROS inhibitors and nitroaspirin. In some embodiments, the second therapeutic agent is cytokine therapy selected from one or more of the following cytokines such as IL-2, IL-7, IL-12, IL-15, IL-17, IL-18 and IL-21, IL23, IL-27, GM-CSF, IFNα (interferon alpha), IFNα-2b, IFNβ, IFNγ, and their different strategies for delivery. In some embodiments, the second therapeutic agent is a therapeutic cancer vaccine selected from a group consisting of exogenous cancer vaccines including proteins or peptides used to mount an immunogenic response to a tumor antigen, recombinant virus and bacteria vectors encoding tumor antigens, DNA-based vaccines encoding tumor antigens, proteins targeted to dendritic cell-based vaccines, whole tumor cell vaccines, gene modified tumor cells expressing GM-CSF, ICOS and/or Flt3-ligand, oncolytic virus vaccines.

[3196] In some embodiments, the second therapeutic agent include EPO, G-CSF, ganciclovir; antibiotics, leuprolide; meperidine; zidovudine (AZT); interleukins 1 through 18, including mutants and analogues; interferons or cytokines, such as interferons a, ′ and y hormones, such as luteinizing hormone releasing hormone (LHRH) and analogues and, gonadotropin releasing hormone (GnRH); growth factors, such as transforming growth factor, fibroblast growth factor (FGF), nerve growth factor (NGF), growth hormone releasing factor (GHRF), epidermal growth factor (EGF), fibroblast growth factor homologous factor (FGFHF), hepatocyte growth factor (HGF), and insulin growth factor (IGF); tumor necrosis factor-alpha (TNF-α); invasion inhibiting factor-2 (IIF-2); bone morphogenetic proteins 1-7 (BMP 1-7); somatostatin; thymosin-a-1; y-globulin; superoxide dismutase (SOD); complement factors; anti-angiogenesis factors; antigenic materials; and pro-drugs.

[3197] Prodrug refers to a precursor or derivative form of a pharmaceutically active substance that is less cytotoxic or non-cytotoxic to tumor cells compared to the parent drug and is capable of being enzymatically activated or converted into an active or the more active parent form. See, e.g., Wilman, “Prodrugs in Cancer Chemotherapy” Biochemical Society Transactions, 14, pp. 375-382, 615th Meeting Belfast (1986) and Stella et al., “Prodrugs: A Chemical Approach to Targeted Drug Delivery,” Directed Drug Delivery, Borchardt et al., (ed.), pp. 247-267, Humana Press (1985). Prodrugs include, but are not limited to, phosphate-containing prodrugs, thiophosphate-containing prodrugs, sulfate-containing prodrugs, peptide-containing prodrugs, D-amino acid-modified prodrugs, glycosylated prodrugs, lactam-containing prodrugs, optionally substituted phenoxyacetamide-containing prodrugs or optionally substituted phenylacetamide-containing prodrugs, 5-fluorocyto-sine and other 5-fluorouridine prodrugs which can be converted into the more active cytotoxic free drug. Examples of cytotoxic drugs that can be derivatized into a prodrug form for use herein include, but are not limited to, those chemotherapeutic agents described above.

[3198] In another embodiment, the antibodies or antigen binding fragment thereof disclosed herein are administered, for the prevention or treatment of cancer prior to (e.g., 1 minute, 15 minutes, 30 minutes, 45 minutes, 1 hour, 2 hours, 4 hours, 6 hours, 8 hours, 12 hours, 24 hours, 2 days, or 1 week before), subsequent to (e.g., 1 minute, 15 minutes, 30 minutes, 45 minutes, 1 hour, 2 hours, 4 hours, 6 hours, 8 hours, 12 hours, 24 hours, 2 days, or 1 week after), or concomitantly with the second therapeutic agent. In another embodiment, the second therapeutic agent can be antibodies immunospecific for one or more cancer cell antigens. In some embodiments, the cancer is refractory to other anti-cancer treatments or a second therapeutic agent. In some embodiments, the cancer is in remission. In some embodiments, one or more antibodies disclosed herein or antigen binding fragments thereof are administered to an animal, preferably a mammal and most preferably a human. In some embodiments, the antibodies disclosed herein or antigen binding fragment thereof are administered after surgical resection of cancer. The method and compositions of the present disclosure contemplate single antibody or antigen binding fragment thereof, disclosed herein, as well as combinations, or “cocktails”, of more than one antibody or antigen binding fragment thereof, disclosed herein. In some embodiments, more than one antibody comprises at least 2, at least 3, at least 4, all 5 antibodies or antigen binding fragment thereof, disclosed herein. Such antibody cocktails may have certain advantages inasmuch as they contain antibodies which exploit different effector mechanisms or combine directly cytotoxic antibodies with antibodies that rely on immune effector functionality.

### Antibody Based Gene Therapy

[3199] In another aspect of the disclosure, nucleic acids molecules comprising sequences encoding antibodies or antigen binding fragment thereof, are administered to treat, inhibit or prevent a disease or disorder by way of gene therapy. In some embodiments, the disease is a cancer. In some embodiments, the disease is a skin cancer. In some embodiments, the disease is a skin cutaneous melanoma. In some embodiments, the disease is associated with aberrant expression and/or activity of an antigen that the antibody binds. Gene therapy refers to therapy performed by the administration to a subject of an expressed or expressible nucleic acid molecule. In this embodiment of the disclosure, the nucleic acid molecules produce their encoded protein (e.g., an antibody or antigen binding fragment disclosed herein) that mediates a therapeutic effect. Any of the methods for gene therapy available can be used according to the present invention. Exemplary methods are described below. For general reviews of the methods of gene therapy, see Goldspiel et al., Clinical Pharmacy 12:488-505 (1993); Wu and Wu, Biotherapy 3:87-95 (1991);

[3200] In a one aspect, the nucleic acid molecule comprising nucleic acid sequences encoding an antibody, said nucleic acid molecule being part of expression vectors that express the antibody or fragments or chimeric proteins or heavy or light chains thereof in a suitable host. In particular, such nucleic acid sequences have promoters operably linked to the antibody coding region, said promoter being inducible or constitutive, and, optionally, tissue-specific.

[3201] In another particular embodiment, nucleic acid molecules are used in which the antibody coding sequences and any other desired sequences are flanked by regions that promote homologous recombination at a desired site in the genome, thus providing for intrachromosomal expression of the antibody encoding nucleic acids (Koller and Smithies, Proc. Natl. Acad. Sci. USA 86:8932-8935 (1989); Zijistra et al., Nature 342:435-438 (1989). In some embodiments, the expressed antibody is a single chain antibody; alternatively, the nucleic acid sequences include sequences encoding both the heavy and light chains, or fragments thereof, of the antibody.

[3202] Delivery of the nucleic acid molecules into a patient may be either direct, in which case the patient is directly exposed to the nucleic acid or nucleic acid-carrying vectors, or indirect, in which case, cells are first transformed with the nucleic acids in vitro, then transplanted into the patient. These two approaches are known, respectively, as in vivo or ex vivo gene therapy.

[3203] In a specific embodiment, the nucleic acid molecules are directly administered in vivo, where it is expressed to produce the encoded product. This can be accomplished by any of numerous methods known in the art, e.g., by constructing them as part of an appropriate nucleic acid expression vector and administering it so that they become intracellular, e.g., by infection using defective or attenuated retrovirals or other viral vectors (see U.S. Pat. No. 4,980,286), or by direct injection of naked DNA, or by use of microparticle bombardment (e.g., a gene gun; Biolistic, Dupont), or coating with lipids or cell-surface receptors or transfecting agents, encapsulation in liposomes, microparticles, or microcapsules, or by administering them in linkage to a peptide which is known to enter the nucleus, by administering it in linkage to a ligand subject to receptor-mediated endocytosis (see, e.g., Wu and Wu, J. Biol. Chem. 262:4429-4432 (1987)) (which can be used to target cell types specifically expressing the receptors), etc. In another embodiment, nucleic acid-ligand complexes can be formed in which the ligand comprises a fusogenic viral peptide to disrupt endosomes, allowing the nucleic acid to avoid lysosomal degradation. In yet another embodiment, the nucleic acid can be targeted in vivo for cell specific uptake and expression, by targeting a specific receptor (see, e.g., PCT Publications WO 92/06180; WO 92/22635; WO92/20316; WO93/14188, WO 93/20221). Alternatively, the nucleic acid can be introduced intracellularly and incorporated within host cell DNA for expression, by homologous recombination (Koller and Smithies, Proc. Natl. Acad. Sci. USA 86:8932-8935 (1989); Zijistra et al., Nature 342:435-438 (1989)).

[3204] In a specific embodiment, viral vectors that contain nucleic acid sequences encoding an antibody of the invention are used. For example, a retroviral vector can be used (see Miller et al., Meth. Enzymol. 217:581-599 (1993)). These retroviral vectors contain the components necessary for the correct packaging of the viral genome and integration into the host cell DNA. The nucleic acid molecules encoding the antibody to be used in gene therapy are cloned into one or more vectors, which facilitates the delivery of the gene into a patient. More detail about retroviral vectors can be found in Boesen et al., Biotherapy 6:291-302 (1994).

[3205] Adenoviruses may also be used in the present invention. Another approach to gene therapy involves transferring a gene to cells in tissue culture by such methods as electroporation, lipofection, calcium phosphate mediated transfection, or viral infection. Usually, the method of transfer includes the transfer of a selectable marker to the cells. The cells are then placed under selection to isolate those cells that have taken up and are expressing the transferred gene. Those cells are then delivered to a patient.

[3206] In this embodiment, the nucleic acid molecule is introduced into a cell prior to administration in vivo of the resulting recombinant cell. Such introduction can be carried out by any method known in the art, including but not limited to transfection, electroporation, microinjection, infection with a viral or bacteriophage vector containing the nucleic acid sequences, cell fusion, chromosome-mediated gene transfer, microcell-mediated gene transfer, spheroplast fusion, etc. Numerous techniques are known in the art for the introduction of foreign genes into cells (see, e.g., Loeffler and Behr, Meth. Enzymol. 217:599-618 (1993)) and may be used in accordance with the present invention, provided that the necessary developmental and physiological functions of the recipient cells are not disrupted. The technique should provide for the stable transfer of the nucleic acid to the cell, so that the nucleic acid is expressible by the cell and preferably heritable and expressible by its cell progeny. The resulting recombinant cells can be delivered to a patient by various methods known in the art. Recombinant blood cells (e.g., hematopoietic stem or progenitor cells) are preferably administered intravenously. The amount of cells envisioned for use depends on the desired effect, patient state, etc., and can be determined by one skilled in the art.

[3207] Cells into which a nucleic acid can be introduced for purposes of gene therapy encompass any desired, available cell type, and include but are not limited to epithelial cells, endothelial cells, keratinocytes, fibroblasts, muscle cells, hepatocytes; blood cells such as T lymphocytes, B lymphocytes, monocytes, macrophages, neutrophils, eosinophils, megakaryocytes, granulocytes; various stem or progenitor cells, in particular hematopoietic stem or progenitor cells, e.g., as obtained from bone marrow, umbilical cord blood, peripheral blood, fetal liver, etc.

[3208] In a one embodiment, the cell used for gene therapy is autologous to the patient. Nucleic acid sequences encoding an antibody of the present invention are introduced into the cells such that they are expressible by the cells or their progeny, and the recombinant cells are then administered in vivo for therapeutic effect. In a specific embodiment, stem or progenitor cells are used. Any stem and/or progenitor cells which can be isolated and maintained in vitro can potentially be used in accordance with this embodiment of the present invention (see e.g. PCT Publication WO 94/08598; Stemple and Anderson, Cell 71:973-985 (1992); Rheinwald, Meth. Cell Bio. 21A:229 (1980); and Pittelkow and Scott, Mayo Clinic Proc. 61:771 (1986)).

### Dosages

[3209] The compositions are to be used for in vivo administration to a subject by any available means, such as parenteral administration. For administration to a subject, a composition or medicament described herein can be sterile, which can readily accomplished by filtration through sterile filtration membranes, or other methods known to those of skill in the art. In one embodiment, a composition of medicament has been treated to be free of pyrogens or endotoxins. Testing pharmaceutical compositions or medicaments for pyrogens or endotoxins and preparing pharmaceutical compositions or medicaments free of pyrogens or endotoxins, or preparing pharmaceutical compositions or medicaments that have endotoxins at a clinically-acceptable level, are well understood to one of ordinary skill in the art. Commercial kits are available to test pharmaceutical compositions or medicaments for pyrogens or endotoxins.

[3210] The antibodies or antigen binding fragments thereof, describe herein, are formulated, dosed, and administered in a fashion consistent with good medical practice. Factors for consideration in this context include the particular disorder being treated, the particular subject being treated, the clinical condition of the individual subject, the cause of the disorder, the site of delivery of the agent, the method of administration, the scheduling of administration, and other factors known to medical practitioners. The “therapeutically effective amount” to be administered will be governed by such considerations, and refers to the minimum amount necessary to ameliorate, treat, or stabilize, the cancer; to increase the time until progression (duration of progression free survival) or to treat or prevent the occurrence or recurrence of a tumor, a dormant tumor, or a micrometastases. The antibodies or antigen binding fragment thereof, disclosed herein, is optionally formulated with one or more additional therapeutic agents currently used to prevent or treat cancer or a risk of developing a cancer. The effective amount of such other agents depends on the amount of antibody or antigen binding fragment thereof present in the formulation, the type of disorder or treatment, and other factors discussed above. These are generally used in the same dosages and with administration routes as used herein before or about from 1 to 99% of the heretofore employed dosages.

[3211] The dose of antibody may vary depending upon the age and the size of a subject to be administered, target disease, conditions, route of administration, and the like. The preferred dose is typically calculated according to body weight or body surface area. When an antibody or antigen binding fragment thereof disclosed herein is used for treating a condition or disease in an adult patient, it may be advantageous to intravenously administer the antibody of the present invention normally at a single dose of about 0.01 to about 20 mg/kg body weight, more preferably about 0.02 to about 7, about 0.03 to about 5, or about 0.05 to about 3 mg/kg, about 5 mg/kg, about 7.5 mg/kg, about 10 mg/kg, or about 15 mg/kg body weight. Depending on the severity of the condition, the frequency and the duration of the treatment can be adjusted. Effective dosages and schedules for administering may be determined empirically; for example, patient progress can be monitored by periodic assessment, and the dose adjusted accordingly. Moreover, interspecies scaling of dosages can be performed using well-known methods in the art (e.g., Mordenti et al., 1991, Pharmaceut. Res. 8:1351).

[3212] Advantageously, the pharmaceutical compositions for oral or parenteral use described above are prepared into dosage forms in a unit dose suited to fit a dose of the active ingredients. Such dosage forms in a unit dose include, for example, tablets, pills, capsules, injections (ampoules), suppositories, etc.

[3213] The administration can be, for example, by one or more separate administrations, or by continuous infusion. For repeated administrations over several days or longer, depending on the condition, the treatment is sustained until, for example, the cancer is treated, as measured by the methods known in the art. However, other dosage regimens can be useful. In one non-limiting example, an antibody or antigen binding fragment thereof, disclosed herein is administered once every week, every two weeks, or every three weeks, at a dose range from about 5 mg/kg to about 15 mg/kg, including but not limited to 5 mg/kg, 7.5 mg/kg, 10 mg/kg or 15 mg/kg. The progress of using the methods described herein can be easily monitored by conventional techniques and assays. The duration of a therapy using the methods described herein will continue for as long as medically indicated or until a desired therapeutic effect (e.g., those described herein) is achieved. In certain embodiments, the administration of one or more antibodies or antigen binding fragment thereof, or compositions, described herein, is continued for 1 month, 2 months, 4 months, 6 months, 8 months, 10 months, 1 year, 2 years, 3 years, 4 years, 5 years, 10 years, 20 years, or for a period of years up to the lifetime of the subject.

### Efficacy of Treatment

[3214] The efficacy of the treatment methods for cancer, comprising administering the antibodies or antigen binding fragment thereof, or pharmaceutical compositions of the present disclosure can be measured by various endpoints commonly used in evaluating cancer treatments, including but not limited to, tumor regression, tumor weight or size shrinkage, time to progression, duration of survival, progression free survival, overall response rate, duration of response, and quality of life. The antibodies or antigen binding fragments thereof disclosed herein can require unique measures and definitions of clinical responses to drugs. In the case of cancers, the therapeutically effective amount of the antibodies, antigen binding fragments thereof disclosed herein or compositions comprising the same can reduce the number of cancer cells; reduce the tumor size; inhibit (i.e., slow to some extent and preferably stop) cancer cell infiltration into peripheral organs; inhibit (i.e., slow to some extent and preferably stop) tumor metastasis; inhibit, to some extent, tumor growth; and/or relieve to some extent one or more of the symptoms associated with the disorder. To the extent the antibodies or antigen binding fragment thereof, disclosed herein, act to prevent growth and/or kill existing cancer cells; it can be cytostatic and/or cytotoxic. For cancer therapy, efficacy in vivo can, for example, be measured by assessing the duration of survival, duration of progression free survival (PFS), the response rates (RR), duration of response, and/or quality of life.

[3215] In those embodiments related to the treatment or prevention of bladder cancer (e.g., bladder urothelial carcinoma), symptoms associated with bladder cancer include, but are not limited to, lower back pain, blood in the urine, painful or frequent urination, and weight loss.

[3216] In those embodiments related to the treatment or prevention of brain cancer (e.g., low-grade glioma), symptoms associated with brain cancer include, but are not limited to, headaches, vomiting, and seizures. Visual loss can be caused by glioma of the optic nerve. Pain, weakness or numbness in the extremities can be caused by spinal cord glioma. Poor reasoning, inappropriate social behavior, personality changes, poor planning, lower inhibition, and decreased production of speech can occur, for example, due to tumor in the frontal lobe. Poor memory, loss of hearing, difficulty in language comprehension can occur, for example, due to tumor in the temporal lobe. Poor interpretation of languages and difficulty speaking, difficulty writing, drawing, naming, and recognizing, and poor spatial and visual perception can occur, for example, due to tumor in the parietal lobe. Poor balance, muscle movement, and posture can occur, for example, due to tumor in the cerebellum. Seizures, endocrine problems, respiratory changes, visual changes, headaches and partial paralysis can occur, for example, due to brain stem tumor.

[3217] In those embodiments related to the treatment or prevention of breast cancer, symptoms associated with breast cancer include, but are not limited to, new lumps in the breast or underarm (armpit); swelling of all or part of a breast (even if no distinct lump is felt), armpit, or collarbone; skin irritation or dimpling (sometimes looking like an orange peel), breast or nipple pain, nipple retraction (turning inward), redness, discoloration, scaliness, flaking, or thickening of the nipple or breast skin, nipple discharge (other than breast milk), tingling, itching, increased sensitivity, burning, pain, tenderness of the breast or nipple, and fibroadenoma.

[3218] In those embodiments related to the treatment or prevention of cervical cancer, symptoms associated with cervical cancer include, but are not limited to, blood spots or light bleeding between or following periods, menstrual bleeding that is longer and heavier than usual, bleeding after intercourse, douching, or a pelvic examination, increased vaginal discharge, pain during sexual intercourse, bleeding after menopause, and unexplained, persistent pelvic and/or back pain.

[3219] In those embodiments related to the treatment or prevention of cholangiocarcinoma, symptoms associated with cholangiocarcinoma include, but are not limited to, abdominal pain, yellowing of skin and the whites of eyes (jaundice), intensely itchy skin, white-colored stools, fatigue, unintended weight loss.

[3220] In those embodiments related to the treatment or prevention of colorectal cancer, symptoms associated with colorectal cancer include, but are not limited to, a change in bowel habits such as diarrhea, constipation, or narrowing of the stool that lasts for more than a few days, rectal bleeding, dark stools, or blood in the stool, cramping or gnawing stomach pain, decreased appetite, vomiting, weight loss, weakness and fatigue, Jaundice-yellowing of the skin and eyes, a feeling that the bowel does not empty properly after a bowel movement, blood in feces that makes stools look black, bright red blood coming from the rectum, pain and bloating in the abdomen, a feeling of fullness in the abdomen, even after not eating for a while, a lump in the abdomen or the back passage felt by your doctor, and unexplained iron deficiency in men, or in women after menopause.

[3221] In those embodiments related to the treatment or prevention of esophageal cancer, symptoms associated with esophageal cancer include, but are not limited to, dysphagia, vomiting, weight loss, cough, voice changes, pain and discomfort, acid reflux, chest pain, difficulty and pain with swallowing, enlarged lymph nodes around the collarbone, pain behind the breastbone or in the throat, nausea, regurgitation of food, and vomiting of blood.

[3222] In those embodiments related to the treatment or prevention of head and neck squamous cell carcinoma, symptoms associated with head and neck squamous cell carcinoma include, but are not limited to, swelling or a sore that does not heal; this is the most common symptom, red or white patch in the mouth, lump, bump, or mass in the head or neck area, with or without pain, persistent sore throat, foul mouth odor not explained by hygiene, hoarseness or change in voice, nasal obstruction or persistent nasal congestion, frequent nose bleeds and/or unusual nasal discharge, difficulty breathing, double vision, numbness or weakness of a body part in the head and neck region, pain or difficulty chewing, swallowing, or moving the jaw or tongue, jaw pain, blood in the saliva or phlegm, which is mucus discharged into the mouth from respiratory passages, loosening of teeth, dentures that no longer fit, unexplained weight loss, fatigue, and ear pain or infection.

[3223] In those embodiments related to the treatment or prevention of kidney cancer, symptoms associated with kidney cancer include, but are not limited to, blood in the urine, a lump in the abdomen, loss of appetite and/or unexpected weight loss, anemia, fatigue, a high temperature, heavy sweating, elevated blood calcium levels and hypertension.

[3224] In those embodiments related to the treatment or prevention of liver cancer, symptoms associated with liver cancer include, but are not limited to, abdominal discomfort, pain, and tenderness, yellowing of the skin and the whites of the eyes, which is called jaundice, white, chalky stools, nausea, vomiting, bruising or bleeding easily, weakness, fatigue, liver enlargement, itching, abdominal mass, fever, anemia, emesis, back pain, enlarged spleen, and swollen legs.

[3225] In those embodiments related to the treatment or prevention of lung cancer, symptoms associated with lung cancer include, but are not limited to coughing, especially if it persists or becomes intense, pain in the chest, shoulder, or back unrelated to pain from coughing, a change in color or volume of sputum, shortness of breath, changes in the voice or being hoarse, harsh sounds with each breath (stridor), recurrent lung problems, such as bronchitis or pneumonia, coughing up phlegm or mucus, especially if it is tinged with blood, coughing up blood, loss of appetite or unexplained weight loss, muscle wasting (also known as cachexia), fatigue, headaches, bone or joint pain, bone fractures not related to accidental injury, neurological symptoms, such as unsteady gait or memory loss, neck or facial swelling, general weakness, bleeding, blood clots, chest pain, bone pain, superior vena cava obstruction, and difficulty swallowing.

[3226] In those embodiments related to the treatment or prevention of mesothelioma, symptoms associated with mesothelioma include, but are not limited to, anemia, blood clotting disorder, bowel obstruction, chest pain, persistent dry cough, persistent raspy cough, coughing up blood (hemoptysis), shortness of breath (dyspnea), pain in the lower back or rib area, chest wall pain, painful breathing, development of lumps under the skin on the chest, difficulty with swallowing (dysphagia), night sweats, fever, nausea, unexplained weight loss, fatigue, swollen abdomen, abdomen effusion, pericardium effusion, peritoneal effusion, pleural effusion, or a combination thereof.

[3227] In some embodiments related to the treatment of a cystadenocarcinoma, the cancer comprises a serous cystadenocarcinoma such as, for example, an ovarian serous cystadenocarcinoma. In those embodiments related to the treatment or prevention of an ovarian serous cystadenocarcinoma, symptoms associated with an cystadenocarcinoma include, but are not limited to, abdominal pain, abdominal swelling, increased abdominal girth, bloating, ascites, nausea, vomiting, unusual bowel movement, anorexia, weight loss, fatigue, or a combination thereof.

[3228] In those embodiments related to the treatment or prevention of a pancreatic cancer such as, for example, a pancreatic adenocarcinoma (PAAD), symptoms associated with pancreatic cancer include, but are not limited to, abdominal pain, mid-back pain, boating, constipation, diarrhea, poor appetite, difficulty digesting food, nausea, vomiting, gall bladder enlargement, liver enlargement, blood clots, jaundice {e.g., dark urine, light colored greasy stools, itching skin, or a combination thereof), weight loss, or a combination thereof. Weight loss can arise from anorexia, maldigestion from pancreatic ductal obstruction, and cachexia. Occasionally, pancreatic duct obstruction can result in attacks of pancreatitis. Deep and superficial venous thrombosis is, in some embodiments, also a symptom of pancreatic cancer, and can be a sign of malignant disease. Gastric outlet obstruction with nausea and vomiting sometimes happens with more advanced disease. In some embodiments, symptoms of pancreatic cancer to be inhibited or treated using the compositions and methods described herein include, but are not limited to, panniculitis and depression. In some embodiments, symptoms of pancreatic cancer to be inhibited or treated using the compositions and methods described herein include, but are not limited to, diabetes mellitus and/or impaired glucose tolerance.

[3229] In those embodiments related to the treatment or prevention of a pheochromocytoma, paraganglioma, or a combination thereof, symptoms associated with a pheochromocytoma, a paraganglioma, or a combination thereof include, but are not limited to, high blood pressure, heavy sweating, headache, rapid heartbeat (tachycardia), tremors, paleness in the face (pallor), shortness of breath (dyspnea), anxiety or sense of doom, constipation, weight loss, flushed skin, sweating, or a combination thereof.

[3230] In those embodiments related to the treatment or prevention of a prostate adenocarcinoma, symptoms associated with a prostate adenocarcinoma include, but are not limited to, trouble urinating; decreased force or interrupted flow in the stream of urine; a need to urinate frequently, especially at night, some-times urgently; difficulty starting or holding back urination; blood in semen; blood in urine; discomfort in the pelvic area; bone pain (e.g., pain in the back, hips, thighs, pelvis, shoulders, or other bones); erectile dysfunction; painful or burning urination; a decrease in the amount of fluid ejaculated; painful ejaculation; swelling or fluid buildup in the legs or feet; unexplained weight loss; fatigue; change in bowel habits; pressure or pain in the rectum; or a combination thereof.

[3231] In those embodiments related to the treatment or prevention of a sarcoma, symptoms associated with a sarcoma include, but are not limited to, a new lump or a lump that's growing anywhere on a subject's body; abdominal pain; blood in stool or vomit; black, tarry stools; or a combination thereof. When sarcomas grow in the back of the abdomen (the retroperitoneum), symptoms may also, or alternatively, include, but are not limited to, blockage or bleeding of the stomach or bowels; pain from the sarcoma pressing on nerves, blood vessels, or nearby organs; or a combination thereof.

[3232] In those embodiments related to the treatment or prevention of a melanoma, symptoms associated with a melanoma such as a skin cutaneous melanoma include, but are not limited to, a change in an existing mole (e.g., a mole with an asymmetrical shape, an irregular border, changes in color, changes in diameter, an evolving mole, itchiness, bleeding, or a combination thereof); development of a new pigmented or unusual-looking growth on a subject's skin; a sore that doesn't heal; spread of pigment from the border of a spot into surrounding skin; redness or a new swelling beyond the border of a mole; change in sensation, such as itchiness, tenderness, or pain; change in the surface of a mole (e.g., scaliness, oozing, bleeding, or the appearance of a lump or bump); or a combination thereof.

[3233] In those embodiments related to the treatment or prevention of an adenocarcinoma such as, for example, a stomach adenocarcinoma, symptoms associated with the adenocarcinoma include, but are not limited to, fatigue; feeling bloated after eating; feeling full after eating small amounts of food; a sensation of being very full during meals; swallowing difficulties (dysphagia); frequent burping; persistent and/or severe heartburn; persistent and/or severe indigestion; unexplained and/or persistent nausea; stomach pain; pain in the breastbone; persistent vomiting; vomiting which contains blood; unintentional or unexpected weight loss; breathlessness; gastritis, inflammation of the lining of the stomach; anemia; a history of stomach ulcers; a buildup of fluid in the stomach which may cause the stomach to feel lumpy; black stools that contain blood; loss of appetite; or a combination thereof.

[3234] In those embodiments related to the treatment or prevention of testicular cancer, symptoms associated with testicular cancer include, but are not limited to, a lump or enlargement in either, or both, testicle(s); a feeling of heaviness in the scrotum; a dull ache in the abdomen, tenderness in the abdomen; pain in the abdomen; a dull ache in the groin; a sudden collection of fluid in the scrotum; pain or discomfort in a testicle; pain or discomfort in the scrotum; enlargement of the breast tissue; tenderness of the breast tissue; back pain, early puberty in boys; shortness of breath; chest pain; a cough; headaches, confusion, or a combination thereof.

[3235] In those embodiments related to the treatment or prevention of a carcinoma such as a thyroid carcinoma, symptoms associated with a carcinoma include, but are not limited to, a lump in the neck; swelling in the neck; pain in the neck, sometimes going up to the ears; pain in the throat; hoarseness that does not go away; voice changes that do not go away; difficulty swallowing; trouble breathing; a constant cough that is not due to a cold; swollen lymph nodes in the neck; or a combination thereof.

[3236] In those embodiments related to the treatment or prevention of a uterine cancer, symptoms associated with a uterine cancer such as a uterine carcinosarcoma (UCS), a uterine corpus endometrial carcinoma (UCEC), or a combination thereof, include, but are not limited to, abnormal bleeding or spotting; vaginal discharge; vaginal bleeding after menopause; bleeding between periods, pelvic pain; a pelvic mass; or a combination thereof.

[3237] In those embodiments related to the treatment or prevention of a uveal melanoma, symptoms associated with a uveal melanoma include, but are not limited to, a sensation of flashes or specks of dust in your vision (floaters); a growing dark spot on the iris; a change in the shape of the dark circle (pupil) at the center of an eye; poor or blurry vision in an eye; loss of peripheral vision; or a combination thereof.

[3238] In some embodiments, one or more symptoms of a cancer can be inhibited or treated using the compositions and methods described herein. In other embodiments, described herein are methods for increasing progression free survival of a human subject susceptible to or diagnosed with a cancer. Time to disease progression is defined as the time from administration of the drug until disease progression or death. In a preferred embodiment, the combination treatment of the invention using an antibody or antigen binding fragment thereof, disclosed herein, and one or more chemotherapeutic agents may significantly increase progression free survival by at least about 1 month, 1.2 months, 2 months, 2.4 months, 2.9 months, 3.5 months, such as by about 1 to about 5 months, when compared to a treatment with chemotherapy alone. In another embodiment, the methods described herein may significantly increase response rates in a group of human subjects susceptible to or diagnosed with a cancer that are treated with various therapeutics. Response rate is defined as the percentage of treated subjects who responded to the treatment. In one embodiment, the combination treatment described herein using an antibody or antigen binding fragment thereof, disclosed herein, such as a recombinant antibody or antigen binding fragment thereof, and one or more chemotherapeutic agents significantly increases response rate in the treated subject group compared to the group treated with chemotherapy alone.

[3239] For example, for pancreatic cancer therapies, CT is the standard method for measurement of tumor burden, and clinical trials usually use RECIST (response evaluation criteria in solid tumors) criteria to gauge tumor response. In some embodiments related to treatment can be used to predict treatment response or disease relapse.

[3240] As used herein, the terms “treat,” “treatment,” “treating,” or “amelioration” refer to therapeutic treatments, wherein the object is to reverse, alleviate, ameliorate, inhibit, slow down or stop the progression or severity of a condition associated with, a disease or disorder. The term “treating” includes reducing or alleviating at least one adverse effect or symptom of a condition, disease or disorder associated with a chronic immune condition, such as, but not limited to, a chronic infection or a cancer. Treatment is generally “effective” if one or more symptoms or clinical markers are reduced. Alternatively, treatment is “effective” if the progression of a disease is reduced or halted. That is, “treatment” includes not just the improvement of symptoms or markers, but also a cessation of at least slowing of progress or worsening of symptoms that would be expected in absence of treatment. Beneficial or desired clinical results include, but are not limited to, alleviation of one or more symptom(s), diminishment of extent of disease, stabilized (i.e., not worsening) state of disease, delay or slowing of disease progression, amelioration or palliation of the disease state, and remission (whether partial or total), whether detectable or undetectable. The term “treatment” of a disease also includes providing relief from the symptoms or side-effects of the disease (including palliative treatment).

[3241] For example, in some embodiments, the methods described herein comprise administering an effective amount of the antibodies or antigen binding fragment thereof, described herein, to a subject in order to alleviate a symptom of a cancer. As used herein, “alleviating a symptom of a cancer” is ameliorating or reducing any condition or symptom associated with the cancer. As compared with an equivalent untreated control, such reduction or degree of prevention is at least 5%, 10%, 20%, 40%, 50%, 60%, 80%, 90%, 95%, or 100% as measured by any standard technique. Ideally, the cancer is completely cleared as detected by any standard method known in the art, in which case the cancer is considered to have been treated. A patient who is being treated for a cancer is one who a medical practitioner has diagnosed as having such a condition. Diagnosis can be by any suitable means. Diagnosis and monitoring can involve, for example, detecting the level of cancer cells in a biological sample (for example, a tissue or lymph node biopsy, blood test, or urine test), detecting the level of a surrogate marker of the cancer in a biological sample, detecting symptoms associated with the specific cancer, or detecting immune cells involved in the immune response typical of such a cancer.

[3242] The term “effective amount” as used herein refers to the amount of an antibody or antigen binding fragment thereof or composition comprising the same needed to alleviate at least one or more symptom of the disease or disorder, and relates to a sufficient amount of pharmacological composition to provide the desired effect. The term “therapeutically effective amount” therefore refers to an amount of a recombinant antibody or antigen binding fragment thereof using the methods as disclosed herein, that is sufficient to effect a particular effect when administered to a typical subject. An effective amount as used herein would also include an amount sufficient to delay the development of a symptom of the disease, alter the course of a symptom disease (for example but not limited to, slow the progression of a symptom of the disease), or reverse a symptom of the disease. Thus, it is not possible to specify the exact “effective amount”. For any given case, however, an appropriate “effective amount” can be determined by one of ordinary skill in the art using only routine experimentation.

[3243] Effective amounts, toxicity, and therapeutic efficacy can be determined by standard pharmaceutical procedures in cell cultures or experimental animals, e.g., for determining the LD50 (the dose lethal to 50% of the population) and the ED50 (the dose therapeutically effective in 50% of the population). The dosage can vary depending upon the dosage form employed and the route of administration utilized. The dose ratio between toxic and therapeutic effects is the therapeutic index and can be expressed as the ratio LD50/ED50-Compositions and methods that exhibit large therapeutic indices are preferred. A therapeutically effective dose can be estimated initially from cell culture assays. Also, a dose can be formulated in animal models to achieve a circulating plasma concentration range that includes the IC50 (i.e., the concentration of the antibody or antigen binding fragment thereof), which achieves a half-maximal inhibition of symptoms as determined in cell culture, or in an appropriate animal model. Levels in plasma can be measured, for example, by high performance liquid chromatography. The effects of any particular dosage can be monitored by a suitable bioassay. The dosage can be determined by a physician and adjusted, as necessary, to suit observed effects of the treatment.

[3244] The treatment and/or prevention of cancer includes, but is not limited to, alleviating symptoms associated with cancer, the inhibition of the progression of cancer, the promotion of the regression of cancer, the promotion of the immune response, inhibition of tumor growth, inhibition of tumor size, inhibition of metastasis, inhibition of cancer cell growth, inhibition of cancer cell proliferation, or cause cancer cell death.

[3245] The terms “increased”, “increase”, or “enhance” are all used herein to generally mean an increase by a statically significant amount; for the avoidance of doubt, the terms “increased”, “increase”, or “enhance”, mean an increase of at least 10% as compared to a reference level, for example an increase of at least about 10%, at least about 20%, or at least about 30%, or at least about 40%, or at least about 50%, or at least about 60%, or at least about 70%, or at least about 80%, or at least about 90% or up to and including a 100% increase or any increase between 10-100% as compared to a reference level, or at least about a 2-fold, or at least about a 3-fold, or at least about a 4-fold, or at least about a 5-fold or at least about a 10-fold increase, or any increase between 2-fold and 10-fold or greater as compared to a reference level.

[3246] The terms, “decrease”, “reduce”, “reduction”, “lower” or “lowering,” or “inhibit” are all used herein generally to mean a decrease by a statistically significant amount. For example, “decrease”, “reduce”, “reduction”, or “inhibit” means a decrease by at least 10% as compared to a reference level, for example a decrease by at least about 20%, or at least about 30%, or at least about 40%, or at least about 50%, or at least about 60%, or at least about 70%, or at least about 80%, or at least about 90% or up to and including a 100% decrease (e.g., tumor size after treatment as compared to a reference level prior to the treatment), or any decrease between 10-100% as compared to a reference level. In the context of a marker or symptom, by these terms is meant a statistically significant decrease in such level. The decrease can be, for example, at least 10%, at least 20%, at least 30%, at least 40% or more, and is preferably down to a level accepted as within the range of normal for an individual without a given disease. Reduce or inhibit can refer to, for example, the symptoms of the disorder being treated, the presence or size of metastases or micrometastases, the size of the primary tumor, the presence or the size of the dormant tumor.

### Modes of Administration

[3247] The antibodies or antigen binding fragment thereof, described herein, can be administered to a subject in need thereof by any appropriate route which results in an effective treatment in the subject. As used herein, the terms “administering,” and “introducing” are used interchangeably and refer to the placement of an antibody or antibody portion thereof into a subject by a method or route which results in at least partial localization of such agents at a desired site, such as a site of inflammation or cancer, such that a desired effect(s) is produced.

[3248] In some embodiments, the antibodies or antigen binding fragment thereof, described herein, or compositions comprising the same is administered to a subject having a cancer, to be inhibited by any mode of administration that delivers the agent systemically or to a desired surface or target, and can include, but is not limited to, injection, infusion, instillation, and inhalation administration. Oral administration forms are also contemplated herein. “Injection” includes, without limitation, intravenous, intramuscular, intraarterial, intrathecal, intraventricular, intracapsular, intraorbital, intracardiac, intradermal, intraperitoneal, transtracheal, subcutaneous, subcuticular, intraarticular, sub capsular, subarachnoid, intracranial, intraspinal, intracerebro spinal, and intrasternal injection and infusion.

[3249] The phrases “parenteral administration” and “administered parenterally” as used herein, refer to modes of administration other than enteral and topical administration, usually by injection. The phrases “systemic administration,” “administered systemically”, “peripheral administration” and “administered peripherally” as used herein refer to the administration of the bispecific or multispecific polypeptide agent other than directly into a target site, tissue, or organ, such as a tumor site, such that it enters the subject's circulatory system and, thus, is subject to metabolism and other like processes.

[3250] In some embodiments, the antibodies, or antigen binding fragment thereof, described herein, or compositions comprising the same can be administered via intravenous administration as a bolus or by continuous infusion over a period of time, by intramuscular, intraperitoneal, intracerobrospinal, subcutaneous, intra-articular, intrasynovial, intrathecal, oral, topical, or inhalation routes. Local administration, for example, to a tumor or cancer site where angiogenesis is occurring, is particularly desired if extensive side effects or toxicity is associated with the use of the antibodies, or antigen binding fragment thereof, described herein, or compositions comprising the same. An ex vivo strategy can also be used for therapeutic applications in some embodiments. Ex vivo strategies involve transfecting or transducing cells obtained from a subject with a nucleic acid sequence, disclosed herein. The transfected or transduced cells are then returned to the subject. The cells can be any of a wide range of types including, without limitation, hematopoietic cells (e.g., bone marrow cells, macrophages, monocytes, dendritic cells, T cells, or B cells), fibroblasts, epithelial cells, endothelial cells, keratinocytes, or muscle cells.

[3251] In some embodiments, an antibody or antigen binding fragment thereof, disclosed herein, or a composition comprising the same is administered by any suitable means, including parenteral, subcutaneous, intraperitoneal, intrapulmonary, and intranasal, and, if desired for local immunosuppressive treatment, intralesional administration. Parenteral infusions include intramuscular, intravenous, intraarterial, intraperitoneal, or subcutaneous administration. In some embodiments, the antibody or antigen binding fragment thereof or compositions of the disclosure are suitably administered by pulse infusion, particularly with declining doses of the antibody. Preferably the dosing is given by injections, most preferably intravenous or subcutaneous injections, depending in part on whether the administration is brief or chronic. In some embodiments, the antibody or antigen binding fragment thereof or compositions of the disclosure are administered locally, e.g., by direct injections, when the disorder or location of the tumor permits, and the injections can be repeated periodically. In some embodiments, the antibody or antigen binding fragment thereof or compositions of the disclosure can also be delivered systemically to the subject or directly to the tumor cells, e.g., to a tumor or a tumor bed following surgical excision of the tumor, in order to prevent or reduce local recurrence or metastasis, for example of a dormant tumor or micrometastases.

[3252] Antibody-targeted sonoporation methods are contemplated for use in some embodiments of the methods for inhibiting tumors described herein, in order to enhance the efficacy and potency of the therapeutic compositions comprising antibodies and antigen binding fragment thereof provided herein. As used herein, “sonoporation” refers to the use of sound, preferably at ultrasonic frequencies, or the interaction of ultrasound with contrast agents (e.g., stabilized microbubbles) for temporarily modifying the permeability of cell plasma membranes, thus allowing uptake of large molecules, such as therapeutic agents. The membrane permeability caused by the sonoporation is transient, leaving the agents trapped inside the cell after the ultrasound exposure. Sonoporation employs acoustic cavitation of microbubbles to enhance delivery of large molecules.

[3253] Accordingly, in some embodiments of the methods, the antibody or antigen binding fragment thereof described herein, mixed with ultrasound contrast agents, such as microbubbles, can be injected locally or systemically into a subject in need of treatment for cancer, and ultrasound can be coupled and even focused into the defined area, e.g., tumor site, to achieve targeted delivery. In some embodiments, the methods use focused ultrasound methods to achieve targeted delivery. As used herein, HIFU or “High Intensity Focused Ultrasound” refers to a non-invasive therapeutic method using high-intensity ultrasound to heat and destroy malignant or pathogenic tissue without causing damage to overlying or surrounding health tissue. As described in Khaibullina et al., 49 J. Nucl. Med. 295 (2008), and WO 2010/127369, HIFU can also be used as a means of delivery of therapeutic agents, such as antibodies or antibody fragments thereof.

[3254] Methods using contrast-enhanced ultrasound (CEUS) are also contemplated for use with an antibody or antigen binding fragment thereof, described herein. Contrast-enhanced ultrasound (CEUS) refers to the application of ultrasound contrast medium and ultrasound contrast agents to traditional medical sonography. Ultrasound contrast agents refer to agents that rely on the different ways in which sound waves are reflected from interfaces between substances. A variety of microbubble contrast agents are available for use with the compositions and methods described herein. Microbubbles can differ in their shell makeup, gas core makeup, and whether or not they are targeted. Targeting ligands that bind to receptors characteristic of angiogenic disorders, can be conjugated to microbubbles, enabling the microbubble complex to accumulate selectively in areas of interest, such as diseased or abnormal tissues. This form of molecular imaging, known as targeted contrast-enhanced ultrasound, will only generate a strong ultrasound signal if targeted microbubbles bind in the area of interest. Targeted contrast-enhanced ultrasound has many applications in both medical diagnostics and medical therapeutics. In some embodiments, an antibody or antigen binding fragment thereof, described herein, is administered to a subject in need of treatment for a cancer or a tumor, using a targeted ultrasound delivery.

### Diagnostic Uses

[3255] Provided herein are methods of using the antibodies for detection, diagnosis and monitoring of a disease, disorder or condition associated with the antigen expression (either increased or decreased relative to a normal sample, and/or inappropriate expression, such as presence of expression in tissues(s) and/or cell(s) that normally lack the epitope expression). Provided herein are methods of determining whether a patient will respond to antibody therapy.

[3256] In some embodiments, the method comprises detecting whether the patient has cells that express target antigen using an antibody disclosed herein. In some embodiments, the method of detection comprises contacting the sample with an antibody or antigen binding fragment thereof of the disclosure, and determining whether the level of binding differs from that of a reference or comparison sample (such as a control). In some embodiments, the method may be useful to determine whether the antibodies or polypeptides described herein are an appropriate treatment for the subject. In some embodiments, the cells or cell/tissue lysate are contacted with an antibody and the binding between the antibody and the cell is determined. When the test cells show binding activity as compared to a reference cell of the same tissue type, it may indicate that the subject would benefit from treatment with an antibody. In some embodiments, the test cells are from human tissues. In some embodiments, the test cells are from human blood.

[3257] Various methods known in the art for detecting specific antibody-antigen binding can be used. Exemplary immunoassays which can be conducted include fluorescence polarization immunoassay (FPIA), fluorescence immunoassay (FIA), enzyme immunoassay (EIA), nephelometric inhibition immunoassay (NIA), enzyme linked immunosorbent assay (ELISA), and radioimmunoassay (RIA). An indicator moiety, or label group, can be attached to the subject antibodies and is selected so as to meet the needs of various uses of the method which are often dictated by the availability of assay equipment and compatible immunoassay procedures. Appropriate labels include, without limitation, radionuclides (for example 125I, 131I, 35S, 3H, or 32P), enzymes (for example, alkaline phosphatase, horseradish peroxidase, luciferase, or β-glactosidase), fluorescent moieties or proteins (for example, fluorescein, rhodamine, phycoerythrin, GFP, or BFP), or luminescent moieties (for example, Qdot™ nanoparticles supplied by the Quantum Dot Corporation, Palo Alto, Calif). General techniques to be used in performing the various immunoassays noted above are known to those of ordinary skill in the art.

[3258] For purposes of diagnosis, the antibodies or antigen binding fragment thereof can be labeled with a detectable moiety including but not limited to radioisotopes, fluorescent labels, and various enzyme-substrate labels know in the art. Methods of conjugating labels to an antibody are known in the art. In some embodiments, the antibodies need not be labeled, and the presence thereof can be detected using a second labeled antibody which binds to the first antibody. The antibodies or antigen binding fragment thereof of the present invention may be used as affinity purification agents for a cancer associated antigen or in diagnostic assays for a cancer associated antigen protein, e.g., detecting its expression in specific cells, tissues, or serum. The antibodies or antigen binding fragment thereof, disclosed herein, may also be used for in vivo diagnostic assays. Generally, for these purposes the antibody is labeled with a radionuclide (such as ulIn, 99Tc, 14C, 131I, 12sI, 3H, 32p or 3sS) so that the tumor can be localized using immunoscintiography.

[3259] The antibodies of the present invention may be employed in any known assay method, such as competitive binding assays, direct and indirect sandwich assays, such as ELISAs, and immunoprecipitation assays. Zola, Monoclonal Antibodies: A Manual of Techniques, pp. 147-158 (CRC Press, Inc. 1987). The antibodies may also be used for immunohistochemistry, to label tumor samples using methods known in the art. As a matter of convenience, the antibody of the present invention can be provided in a kit, i.e., a packaged combination of reagents in predetermined amounts with instructions for performing the diagnostic assay. Where the antibody is labeled with an enzyme, the kit will include substrates and cofactors required by the enzyme (e.g., a substrate precursor which provides the detectable chromophore or fluorophore). In addition, other additives may be included such as stabilizers, buffers (e.g., a block buffer or lysis buffer) and the like. The relative amounts of the various reagents may be varied widely to provide for concentrations in solution of the reagents which substantially optimize the sensitivity of the assay. Particularly, the reagents may be provided as dry powders, usually lyophilized, including excipients which on dissolution will provide a reagent solution having the appropriate concentration.

### Kits

[3260] Provided herein are also kits, medicines, compositions, and unit dosage forms for use in any of the methods described herein. Provided herein is a kit comprising a therapeutically effective amount of at least one of the antibody or antigen binding fragment thereof disclosed herein. In some embodiments, the kit further comprises a second therapeutic agent (e.g., a chemotherapeutic agent). In some embodiments, the antibody or antigen binding fragment thereof is an aqueous form or a lyophilized form. The kit further comprises a diluent or a reconstitution solution.

[3261] Kits can include one or more containers comprising an antibody (or unit dosage forms and/or articles of manufacture). In some embodiments, a unit dosage is provided wherein the unit dosage contains a predetermined amount of a composition comprising an antibody (e.g., a therapeutically effective amount), with or without one or more additional agents. In some embodiments, such a unit dosage is supplied in single-use prefilled syringe for injection. In some embodiments, the composition comprising the antibody or antigen binding fragment thereof can comprise saline, sucrose, or the like; a buffer, such as phosphate, or the like; and/or be formulated within a stable and effective pH range. In some embodiments, the antibody or antigen binding fragment thereof can be provided as a lyophilized powder that may be reconstituted upon addition of an appropriate liquid, for example, sterile water. In some embodiments, the antibody or antigen binding fragment thereof further comprises one or more substances that inhibit protein aggregation, including, but not limited to, sucrose and arginine. In some embodiments, the antibody or antigen binding fragment thereof further comprises heparin and/or a proteoglycan.

[3262] In some embodiments, kits further comprise instructions for use in the treatment of cancer in accordance with any of the methods described herein. The kit may further comprise a description of selection an individual suitable or treatment. Instructions supplied in the kits are typically written instructions on a label or package insert (for example, a paper sheet included in the kit), but machine-readable instructions (for example, instructions carried on a magnetic or optical storage disk) are also acceptable. In some embodiments, the kit further comprises another therapeutic agent (e.g., an anti-cancer antibody or a chemotherapeutic agent)

[3263] The kits are in suitable packaging. Suitable packaging includes, but is not limited to, vials, bottles, jars, flexible packaging (for example, sealed Mylar or plastic bags), and the like. Kits may optionally provide additional components such as buffers and interpretative information. The present application thus also provides articles of manufacture, which include vials (such as sealed vials), bottles, jars, flexible packaging, and the like.

[3264] While certain embodiments of the present application have been shown and described herein, it will be obvious that such embodiments are provided by way of example only. Numerous variations, changes, and substitutions may occur to those skilled in the art without departing from the embodiments; it should be understood that various alternatives to the embodiments described herein may be employed in practicing the methods described herein.

### EXAMPLES

[3265] Provided below are exemplary methods for in silico reconstruction of consensus sequences of cancer associated antibodies. Also described herein are computational analytical approaches for estimation of immunoglobulin repertoire diversity and the identification of clonal rearranged immunoglobulin CDR3 sequences present in the repertoire. The approaches are contemplated for the reconstruction of complete consensus sequences of the variable heavy chain, variable light chain and the respective CDR3 of said immunoglobulins.

### Example 1: Estimation of the Immunoglobulin Repertoire Diversity

[3266] RNA-seq FASTQ files for 10177 TCGA patients representative of 30 cancer types collected by TCGA consortium (The Cancer Genome Atlas, NCI & NHGRI) were recorded and analyzed. RNA-seq samples (n=10177) were aligned to reference V, D and J genes of immunoglobulins in order to identify the repertoire present in the samples. Then, identical CDR3 sequences were identified and grouped in clonotypes. The information was exported into a tab-delimited and understandable text file (FIG. 1). From the initial 10177 samples, 4782 samples were eliminated for which there were no reads aligning to immunoglobulin heavy chain genes or the number of reads was lower than the downsampling threshold. In total, the information on immunoglobulin (Ig) diversity from 5395 samples was collected and analyzed.

[3267] VDJtools were used to filter out non-functional (non-coding) clonotypes and to compute basic diversity statistics. Non-functional clonotypes were identified as those containing a stop codon or frameshift in their receptor sequence. The diversity of the Ig repertoire was based on the corrected effective number of species which is calculated based on Chao et al., 2013, Methods in Ecology and Evolution, Volume 4, Issue 11. Here, the effective number of species refers the exponent of the Shannon-Wiener Entropy index such that a community of S species with species frequencies p 1, . . . pi, . . . ps, then the diversity (D) is the exponent of the Shannon-Wiener Entropy index (H) given by:

$$D = exp ( H ) = exp ( - {\sum }_{i = 1}^{s} {p}_{i} ln {p}_{i} )$$

### Example 2: Identification of Clonal Immunoglobulin Sequences

[3268] The R software was used on the files obtained from the first alignment step to analyze which samples pass the clonality threshold (eHbc <20). Out of the 5395 samples, 598 pass this threshold. Next, we chose the samples with the correct pairing of heavy and light chains as the two top clonal chains that could be reliably identified. 271 samples were selected for further antibody reconstruction.

### Example 3: Alignment and Assembly of VDJ Sequences

[3269] Alignments were performed against the immunoglobulin segments identified by the first alignment step for viewing the results, allowing the exploration of the frequency distribution of sequence mismatches along the V, D, J gene segments and in particular in the CDR3 region length statistics. This alignment step was useful for summarizing repertoires, as well as offering a detailed view of rearrangements and region alignments for individual query sequences. More details about the alignment and assembly methodology are given in the Example 5 below.

[3270] In brief, the identified segments by first alignment step from IMGT were first provided using the reference files provided in the BraCeR tool. The heavy D segment and light V-J junction sequences were then reconstructed using an in-house built assembler (see EXAMPLE 5 for detailed description). A FASTA file with corrected heavy D and light V-J junction sequences was generated for each sample. In addition to the assembled FASTA files using IgBLAST v1.9.0 and IMGT database were also generated. The somatic FASTA sequence was inputted to IgBLAST and to obtain the closest segment ids for the heavy and light chain. The final assembled FASTA sequences served as ‘reference’ sequences for the alignment and visualization steps described below. Final ‘reconstructed’ nucleotide and amino acid consensus sequences of antibodies associated with a cancer are provided herein.

### Quality Control and Visual Confirmation of Alignments

[3271] Using the reference files generated from the assembly step, the FASTQs were aligned in BowTie2 default mode. The output BAM file can be used for IGV visualization and mutations in the patient can be observed.

[3272] Example alignments and corresponding hypermutations using BowTie2 with default parameters for 3 exemplary patients are shown in FIG. 2A-2F. The D segments of the heavy chain was identified using a custom local assembly tool and edited the corresponding part of the FASTA file, therefore, no mutations are shown in D segments of IGV plots.

### Example 4: Identification of Rearranged Immunoglobulin CDR3 Amino Acid Sequences

[3273] The identification of the CDR3 region and corresponding V, D, and J chains from the final assembled FASTA sequences was achieved with IgBLAST. The standardized output using version v. 1.9.0 of IgBLAST was delivered by wrapping IgBLASTn with default parameters. The output from the IgBLAST service is extracted using a purpose-built parser tool designed to extract the CDR1, CDR2 and CDR3 nucleotide and amino acid sequences. Summary of identified nucleotide and amino acid consensus sequences for CDR3 for the selected tumor samples are provided herein.

### Example 5: VDJ Sequence Identification Workflow

[3274] VDJ Sequence identification workflow was used to determine somatic sequences of given patient and information such as CDR regions and mutation rates. The exemplary pipeline comprised of 3 steps (FIG. 3): Step 1: Pipeline P 1: Somatic Sequence Identification; Step 2: Manual IGV Investigation and (if necessary) Correction of Somatic VDJ Sequence; and Step 3: Pipeline P2: CDR Regions Identification and Amino Acid Translation.

[3275] The workflow accepted 2 inputs for each target patient: (1) the TCGA Archive File: TCGA archive file of the patient. Prefixes of all output files were determined based on metadata (i.e. aliquot id) of patients' archive file; and (2) the preliminary alignment Output File: IG clones output of preliminary alignment were used to obtain initial segment id predictions. This text file included both heavy and light chain results.

[3276] By completing all three steps of the pipeline, the following output files were obtained: Somatic Sequence: A FASTA file for a given patient's identified VDJ sequence; The amino acid translation of Somatic FASTA files; IgBLAST output log for somatic FASTA file: Contains CDR regions; Alignment Logs: Visual text representation of the heavy D region and light V-J junction of somatic sequence (For validation purpose); and Pileup logs: Contains somatic mutation rate of segments and V-C segment coverage ratio of heavy and light chain which we use as an internal quality control metric.

### Step 1: Somatic Sequence Identification

[3277] The first step of the VDJ sequence identification workflow was the somatic sequence identification. For this purpose, two input were initially taken, which were the IG segments id identified during the first alignment step and the FASTQ file of the patient. Somatic sequence identification was performed in 3 sub-stages (FIG. 4).

### Assembly Stage

[3278] During the preliminary alignment step, the VDJC segment ids were identified for both heavy and light chain. Then with use of the segment ids and IMGT database, the heavy and light chain sequences were generated by appending segment sequences to form V(D)JC structure.

[3279] When the FASTQ of a patient was aligned with the reference FASTA generated by the first alignment step, it was often observed that D segment of the heavy chain (FIG. 5) did not properly align. One reason of observing a low coverage in these areas could be the high mutation rate of antibody construction. Somatic mutations in these two regions are high enough that during the alignment against IMGT reference, many reads were eliminated. In addition, sizes of the reads were typically small for TCGA patients (i.e., about 50 bp) which were harder to align to difficult (mutated) regions.

[3280] In order to identify the correct sequence in heavy D and light V-J junction, a custom assembly based algorithm was implemented. From the VDJ segments identified during the first alignment step, a 22 bp seed sequence was selected from the ending of V segments. From the end of V segment, the read length was read backwards. From that index, the next 22 bp was selected as the initial seed.

[3281] Once the seed sequence was selected, the FASTQ file was searched for the reads that contain this seed sequence. Since somatic mutations could occur, a fuzzy pattern searching algorithm was used (i.e., bitap algorithm) by allowing matches up to 4 edit distance penalty.

[3282] After the reads were selected in the first iteration, the unrelated ones were eliminated by comparing the whole read with V segment. The match ratio was checked of the intersection of reads and the V segment identified during the first alignment step. If the match ratio is less than 0.84, then the read was removed. Once the unrelated reads were removed, the reads were sorted descending by their match ratios and selected the first half of reads for pile up processing.

[3283] Using the selected reads, the bases were piled up and formed a single sequence. From the generated sequence, another 22 bp seed was selected and started a new iteration. For the following iterations, the maximum edit distance penalty was decreased to 1 and a read elimination was not performed in contrast to the first iteration. The iteration continued until a long enough final assembled sequence that covers more than half of the J segment was obtained (FIG. 6).

[3284] Once the assembled Heavy D region and Light V-J junction were obtained, the corresponding part of the reference was edited and produced an intermediate FASTA file for the alignment stage.

### Alignment Stage

[3285] After the difficult regions (i.e., heavy D and light V-J junction) were identified using a custom assembly method, the aim was to correct the remaining variants (i.e., variants seen in FIG. 7) by using a standard variant calling pipeline which involved aligning reads followed by variant calling operation. For this purpose, BowTie2 2.2.6 with default parameters was used. To decrease the size of the output BAM file, the unaligned reads were discarded from the BAM file. After that, Sambamba 0.5.9 was used to sort the output BAM file.

### Pileup Stage

[3286] In the third stage, rather than using a variant caller, the BAM file was used from the alignment stage do a pile-up processing to identify and correct variants in the reference file. For each position in the alignment, SNPs and INDELs were checked. Reads less than 20 quality threshold were ignored. In order to identify a variant in a specific position, 0.5 as the minimum ratio was applied, which meant that at least half of the total reads should contained that variant for the position. The variants in positions were also ignored where the total coverage is less than 200 reads. It was mostly observed that low coverage value in the first few base pairs of V segments and at the ending few base pairs of C segment.

### Mutation Rate Calculation

[3287] Once a final sequence was obtained, the sequence was compared with the initial reference file which the BAM file was generated from. The mutation rate was calculated as the Levenshtein Distance between segments divided by the Alignment Length of segments (i.e., Python Levenshtein.ratio (seql, seq2)).

Coverage Ratio between V and C segments

[3288] The average coverage was checked between V and C segments of both chains as an internal quality control step to ensure that the patient was high clonal. In the pileup log file, if the coverage ratio was over 0.3 then this suggested high clonality. A high V/C ratio might not always mean that the patient is highly clonal. However, a low V/C ratio could be a strong sign for low clonality.

### Step 2: Manual IGV Inspection & Somatic Sequence Correction

[3289] Once the somatic FASTA files were obtained through step 1, the FASTA file was manually inspected using IGV browser. The IGV browser was check on whether it showed a variant in our somatic reference file. Bases were mostly corrected which were previously skipped due to the low number of reads in pileup stage of step 1.

### Step 3: Final CDR Regions Identification and Amino-Acid Translation

[3290] FIG. 8 illustrates detailed schema of CDR sequence identification and amino acid translation workflow. Once a final somatic sequence was identified in the first two steps, the reference was inputted to the IgBLAST tool to identify the closest segment ids from the IMGT database. IgBLAST also reported the positions of the CDR1, CDR2 and CDR3 sequences of the exemplary antibodies. Using those positions, the somatic sequence was clipped and the CDR regions returned with their amino acid translations. As a final step, the amino acid translation of reconstructed complete somatic VDJ consensus sequences was produced.

[3291] Exemplary reconstructed amino acid and nucleic acid consensus sequences of variable heavy chain, variable light chain and their corresponding CDR3 are provided herein.

### Example 6: Identification of Target Cancer Antigen

[3292] To determine the target antigen and specificity and affinity for an identified target antigen, antibodies described herein are analyzed using the High-Spec® cross-reactivity assay on HUPROT™ human proteome arrays, which contain the largest human protein collection on a single array. The HUPROT™ Human Proteome Microarray allows interactions between antibodies and candidate antigen proteins to be profiled in a high-throughput manner. The full-length recombinant candidate antigen proteins are expressed in the yeast S. cerevisiae, purified, and printed on glass slides in duplicate along with a set of control proteins (GST, BSA, histones, IgG, etc.). The HUPROT™ microarray is not restricted to a particular type of surface coating, although the default is glass coated with ultra-thin nitrocellulose film for the non-covalent, yet irreversible, capture of active proteins to the surface.

[3293] Antibody samples are probed on native HUPROT™ arrays at 1 g/ml and incubated at room temperature for 1 hour. After probing, the arrays are washed according to the standard protocols and probed with Alexa-647-anti-human IgG Fc gamma specific secondary antibodies under conditions optimized for signal detection.

### Data Analysis

[3294] Non-specific hits that directly bind to the secondary antibodies are eliminated from the analysis of the samples. The specificity of each individual antibody sample to specific target antigen proteins on the array are quantified based on Z Scores.

[3295] Z score is the average Z score of the duplicate spots of a given protein (each protein is printed in duplicate on a HuProt™ array). The Z score of each spot on a given array is calculated according to the algorithm: Z=[F635−F635(avg)]/F635(std).

[3296] F635(avg) and F635(std) are the average and standard deviation of the F635 values of all spots on the array, respectively. S score is the difference of the Z Scores of a given protein and the one ranked next to it. If the S score of the top hit is >3, the antibody is considered as high specific against the top hit.

[3297] F635 is the average foreground signal intensity of 2 replicate spots of a given protein in the detection channel (635 nm). B635 is the average background signal intensity of 2 replicate spots of a given protein in the detection channel (635 nm). Range includes 3 numbers, the F635 values of the 2 replicate spots and the difference between them. If the difference is too high (compared to the F635 value), it indicates the 2 spots are not consistent and the hit may be less reliable. The non-specific hits bound by the secondary antibody are removed from the analysis of the samples.

[3298] Exemplary reconstructed amino acid and nucleic acid consensus sequences of variable heavy chain, variable light chain and their corresponding CDR3 are provided below.

TABLE 1

| | SEQ ID NO: | | | | | | | |
|---|---|---|---|---|---|---|---|---|
| | Variable | | | | | | | |
| | Region | | CDR1 | | CDR2 | | CDR3 | |
| | Heavy | Light | Heavy | Light | Heavy | Light | Heavy | Light |
| Antibody | chain | chain | chain | chain | chain | chain | chain | chain |
| name | (V_{H}) | (V_{L}) | (CDR-H1) | (CDR- L1) | CDR-H2 | (CDR-L2) | (CDR-H3) | (CDR-L3) |
| TBLA1001 | 1 | 272 | 543 | 814 | 1085 | 1356 | 1627 | 1898 |
| TBLA1002 | 2 | 273 | 544 | 815 | 1086 | 1357 | 1628 | 1899 |
| TBLA1003 | 3 | 274 | 545 | 816 | 1087 | 1358 | 1629 | 1900 |
| TBLA1004 | 4 | 275 | 546 | 817 | 1088 | 1359 | 1630 | 1901 |
| TBLA1005 | 5 | 276 | 547 | 818 | 1089 | 1360 | 1631 | 1902 |
| TBLA1006 | 6 | 277 | 548 | 819 | 1090 | 1361 | 1632 | 1903 |
| TBLA1007 | 7 | 278 | 549 | 820 | 1091 | 1362 | 1633 | 1904 |
| TBLA1008 | 8 | 279 | 550 | 821 | 1092 | 1363 | 1634 | 1905 |
| TBLA1009 | 9 | 280 | 551 | 822 | 1093 | 1364 | 1635 | 1906 |
| TBLA1010 | 10 | 281 | 552 | 823 | 1094 | 1365 | 1636 | 1907 |
| TBLA1011 | 11 | 282 | 553 | 824 | 1095 | 1366 | 1637 | 1908 |
| TBLA1012 | 12 | 283 | 554 | 825 | 1096 | 1367 | 1638 | 1909 |
| TBLA1013 | 13 | 284 | 555 | 826 | 1097 | 1368 | 1639 | 1910 |
| TBRE1001 | 14 | 285 | 556 | 827 | 1098 | 1369 | 1640 | 1911 |
| TBRE1002 | 15 | 286 | 557 | 828 | 1099 | 1370 | 1641 | 1912 |
| TBRE1003 | 16 | 287 | 558 | 829 | 1100 | 1371 | 1642 | 1913 |
| TBRE1004 | 17 | 288 | 559 | 830 | 1101 | 1372 | 1643 | 1914 |
| TBRE1005 | 18 | 289 | 560 | 831 | 1102 | 1373 | 1644 | 1915 |
| TBRE1006 | 19 | 290 | 561 | 832 | 1103 | 1374 | 1645 | 1916 |
| TBRE1007 | 20 | 291 | 562 | 833 | 1104 | 1375 | 1646 | 1917 |
| TBRE1008 | 21 | 292 | 563 | 834 | 1105 | 1376 | 1647 | 1918 |
| TBRE1009 | 22 | 293 | 564 | 835 | 1106 | 1377 | 1648 | 1919 |
| TBRE1010 | 23 | 294 | 565 | 836 | 1107 | 1378 | 1649 | 1920 |
| TBRE1011 | 24 | 295 | 566 | 837 | 1108 | 1379 | 1650 | 1921 |
| TBRE1012 | 25 | 296 | 567 | 838 | 1109 | 1380 | 1651 | 1922 |
| TBRE1013 | 26 | 297 | 568 | 839 | 1110 | 1381 | 1652 | 1923 |
| TBRE1014 | 27 | 298 | 569 | 840 | 1111 | 1382 | 1653 | 1924 |
| TBRE1015 | 28 | 299 | 570 | 841 | 1112 | 1383 | 1654 | 1925 |
| TBRE1016 | 29 | 300 | 571 | 842 | 1113 | 1384 | 1655 | 1926 |
| TBRE1017 | 30 | 301 | 572 | 843 | 1114 | 1385 | 1656 | 1927 |
| TBRE1018 | 31 | 302 | 573 | 844 | 1115 | 1386 | 1657 | 1928 |
| TBRE1019 | 32 | 303 | 574 | 845 | 1116 | 1387 | 1658 | 1929 |
| TBRE1020 | 33 | 304 | 575 | 846 | 1117 | 1388 | 1659 | 1930 |
| TBRE1021 | 34 | 305 | 576 | 847 | 1118 | 1389 | 1660 | 1931 |
| TBRE1022 | 35 | 306 | 577 | 848 | 1119 | 1390 | 1661 | 1932 |
| TBRE1023 | 36 | 307 | 578 | 849 | 1120 | 1391 | 1662 | 1933 |
| TBRE1024 | 37 | 308 | 579 | 850 | 1121 | 1392 | 1663 | 1934 |
| TBRE1025 | 38 | 309 | 580 | 851 | 1122 | 1393 | 1664 | 1935 |
| TBRE1026 | 39 | 310 | 581 | 852 | 1123 | 1394 | 1665 | 1936 |
| TBRE1027 | 40 | 311 | 582 | 853 | 1124 | 1395 | 1666 | 1937 |
| TBRE1028 | 41 | 312 | 583 | 854 | 1125 | 1396 | 1667 | 1938 |
| TBRE1029 | 42 | 313 | 584 | 855 | 1126 | 1397 | 1668 | 1939 |
| TBRE1030 | 43 | 314 | 585 | 856 | 1127 | 1398 | 1669 | 1940 |
| TBRE1031 | 44 | 315 | 586 | 857 | 1128 | 1399 | 1670 | 1941 |
| TBRE1032 | 45 | 316 | 587 | 858 | 1129 | 1400 | 1671 | 1942 |
| TBRE1033 | 46 | 317 | 588 | 859 | 1130 | 1401 | 1672 | 1943 |
| TBRE1034 | 47 | 318 | 589 | 860 | 1131 | 1402 | 1673 | 1944 |
| TBRE1035 | 48 | 319 | 590 | 861 | 1132 | 1403 | 1674 | 1945 |
| TBRE1036 | 49 | 320 | 591 | 862 | 1133 | 1404 | 1675 | 1946 |
| TBRE1037 | 50 | 321 | 592 | 863 | 1134 | 1405 | 1676 | 1947 |
| TBRE1038 | 51 | 322 | 593 | 864 | 1135 | 1406 | 1677 | 1948 |
| TBRE1039 | 52 | 323 | 594 | 865 | 1136 | 1407 | 1678 | 1949 |
| TBRE1040 | 53 | 324 | 595 | 866 | 1137 | 1408 | 1679 | 1950 |
| TBRE1041 | 54 | 325 | 596 | 867 | 1138 | 1409 | 1680 | 1951 |
| TBRE1042 | 55 | 326 | 597 | 868 | 1139 | 1410 | 1681 | 1952 |
| TBRE1043 | 56 | 327 | 598 | 869 | 1140 | 1411 | 1682 | 1953 |
| TBRE1044 | 57 | 328 | 599 | 870 | 1141 | 1412 | 1683 | 1954 |
| TBRE1045 | 58 | 329 | 600 | 871 | 1142 | 1413 | 1684 | 1955 |
| TBRE1046 | 59 | 330 | 601 | 872 | 1143 | 1414 | 1685 | 1956 |
| TBRE1047 | 60 | 331 | 602 | 873 | 1144 | 1415 | 1686 | 1957 |
| TBRE1048 | 61 | 332 | 603 | 874 | 1145 | 1416 | 1687 | 1958 |
| TBRE1049 | 62 | 333 | 604 | 875 | 1146 | 1417 | 1688 | 1959 |
| TBRE1050 | 63 | 334 | 605 | 876 | 1147 | 1418 | 1689 | 1960 |
| TBRE1051 | 64 | 335 | 606 | 877 | 1148 | 1419 | 1690 | 1961 |
| TBRE1052 | 65 | 336 | 607 | 878 | 1149 | 1420 | 1691 | 1962 |
| TBRE1053 | 66 | 337 | 608 | 879 | 1150 | 1421 | 1692 | 1963 |
| TBRE1054 | 67 | 338 | 609 | 880 | 1151 | 1422 | 1693 | 1964 |
| TBRE1055 | 68 | 339 | 610 | 881 | 1152 | 1423 | 1694 | 1965 |
| TBRE1056 | 69 | 340 | 611 | 882 | 1153 | 1424 | 1695 | 1966 |
| TBRE1057 | 70 | 341 | 612 | 883 | 1154 | 1425 | 1696 | 1967 |
| TBRE1058 | 71 | 342 | 613 | 884 | 1155 | 1426 | 1697 | 1968 |
| TCER1001 | 72 | 343 | 614 | 885 | 1156 | 1427 | 1698 | 1969 |
| TCER1002 | 73 | 344 | 615 | 886 | 1157 | 1428 | 1699 | 1970 |
| TCER1003 | 74 | 345 | 616 | 887 | 1158 | 1429 | 1700 | 1971 |
| TCER1004 | 75 | 346 | 617 | 888 | 1159 | 1430 | 1701 | 1972 |
| TCER1005 | 76 | 347 | 618 | 889 | 1160 | 1431 | 1702 | 1973 |
| TCER1006 | 77 | 348 | 619 | 890 | 1161 | 1432 | 1703 | 1974 |
| TCER1007 | 78 | 349 | 620 | 891 | 1162 | 1433 | 1704 | 1975 |
| TCHO1001 | 79 | 350 | 621 | 892 | 1163 | 1434 | 1705 | 1976 |
| TCOL1001 | 80 | 351 | 622 | 893 | 1164 | 1435 | 1706 | 1977 |
| TCOL1002 | 81 | 352 | 623 | 894 | 1165 | 1436 | 1707 | 1978 |
| TCOL1003 | 82 | 353 | 624 | 895 | 1166 | 1437 | 1708 | 1979 |
| TCOL1004 | 83 | 354 | 625 | 896 | 1167 | 1438 | 1709 | 1980 |
| TCOL1005 | 84 | 355 | 626 | 897 | 1168 | 1439 | 1710 | 1981 |
| TCOL1006 | 85 | 356 | 627 | 898 | 1169 | 1440 | 1711 | 1982 |
| TCOL1007 | 86 | 357 | 628 | 899 | 1170 | 1441 | 1712 | 1983 |
| TCOL1008 | 87 | 358 | 629 | 900 | 1171 | 1442 | 1713 | 1984 |
| TCOL1009 | 88 | 359 | 630 | 901 | 1172 | 1443 | 1714 | 1985 |
| TESO1001 | 89 | 360 | 631 | 902 | 1173 | 1444 | 1715 | 1986 |
| TESO1002 | 90 | 361 | 632 | 903 | 1174 | 1445 | 1716 | 1987 |
| TESO1003 | 91 | 362 | 633 | 904 | 1175 | 1446 | 1717 | 1988 |
| TESO1004 | 92 | 363 | 634 | 905 | 1176 | 1447 | 1718 | 1989 |
| TESO1005 | 93 | 364 | 635 | 906 | 1177 | 1448 | 1719 | 1990 |
| TESO1006 | 94 | 365 | 636 | 907 | 1178 | 1449 | 1720 | 1991 |
| TESO1007 | 95 | 366 | 637 | 908 | 1179 | 1450 | 1721 | 1992 |
| THNS1001 | 96 | 367 | 638 | 909 | 1180 | 1451 | 1722 | 1993 |
| THNS1002 | 97 | 368 | 639 | 910 | 1181 | 1452 | 1723 | 1994 |
| THNS1003 | 98 | 369 | 640 | 911 | 1182 | 1453 | 1724 | 1995 |
| THNS1004 | 99 | 370 | 641 | 912 | 1183 | 1454 | 1725 | 1996 |
| THNS1005 | 100 | 371 | 642 | 913 | 1184 | 1455 | 1726 | 1997 |
| THNS1006 | 101 | 372 | 643 | 914 | 1185 | 1456 | 1727 | 1998 |
| THNS1007 | 102 | 373 | 644 | 915 | 1186 | 1457 | 1728 | 1999 |
| THNS1008 | 103 | 374 | 645 | 916 | 1187 | 1458 | 1729 | 2000 |
| THNS1009 | 104 | 375 | 646 | 917 | 1188 | 1459 | 1730 | 2001 |
| THNS1010 | 105 | 376 | 647 | 918 | 1189 | 1460 | 1731 | 2002 |
| THNS1011 | 106 | 377 | 648 | 919 | 1190 | 1461 | 1732 | 2003 |
| THNS1012 | 107 | 378 | 649 | 920 | 1191 | 1462 | 1733 | 2004 |
| THNS1013 | 108 | 379 | 650 | 921 | 1192 | 1463 | 1734 | 2005 |
| THNS1014 | 109 | 380 | 651 | 922 | 1193 | 1464 | 1735 | 2006 |
| TKIC1001 | 110 | 381 | 652 | 923 | 1194 | 1465 | 1736 | 2007 |
| TKIC1002 | 111 | 382 | 653 | 924 | 1195 | 1466 | 1737 | 2008 |
| TKIC1003 | 112 | 383 | 654 | 925 | 1196 | 1467 | 1738 | 2009 |
| TKIC1004 | 113 | 384 | 655 | 926 | 1197 | 1468 | 1739 | 2010 |
| TKIC1005 | 114 | 385 | 656 | 927 | 1198 | 1469 | 1740 | 2011 |
| TKIC1006 | 115 | 386 | 657 | 928 | 1199 | 1470 | 1741 | 2012 |
| TKIC1007 | 116 | 387 | 658 | 929 | 1200 | 1471 | 1742 | 2013 |
| TKIC1008 | 117 | 388 | 659 | 930 | 1201 | 1472 | 1743 | 2014 |
| TKIC1009 | 118 | 389 | 660 | 931 | 1202 | 1473 | 1744 | 2015 |
| TKIC1010 | 119 | 390 | 661 | 932 | 1203 | 1474 | 1745 | 2016 |
| TKIC1011 | 120 | 391 | 662 | 933 | 1204 | 1475 | 1746 | 2017 |
| TKIC1012 | 121 | 392 | 663 | 934 | 1205 | 1476 | 1747 | 2018 |
| TKIC1013 | 122 | 393 | 664 | 935 | 1206 | 1477 | 1748 | 2019 |
| TKIC1014 | 123 | 394 | 665 | 936 | 1207 | 1478 | 1749 | 2020 |
| TKIC1015 | 124 | 395 | 666 | 937 | 1208 | 1479 | 1750 | 2021 |
| TKIC1016 | 125 | 396 | 667 | 938 | 1209 | 1480 | 1751 | 2022 |
| TKIC1017 | 126 | 397 | 668 | 939 | 1210 | 1481 | 1752 | 2023 |
| TKIC1018 | 127 | 398 | 669 | 940 | 1211 | 1482 | 1753 | 2024 |
| TKIC1019 | 128 | 399 | 670 | 941 | 1212 | 1483 | 1754 | 2025 |
| TKIC1020 | 129 | 400 | 671 | 942 | 1213 | 1484 | 1755 | 2026 |
| TKIP1001 | 130 | 401 | 672 | 943 | 1214 | 1485 | 1756 | 2027 |
| TKIP1002 | 131 | 402 | 673 | 944 | 1215 | 1486 | 1757 | 2028 |
| TKIP1003 | 132 | 403 | 674 | 945 | 1216 | 1487 | 1758 | 2029 |
| TKIP1004 | 133 | 404 | 675 | 946 | 1217 | 1488 | 1759 | 2030 |
| TKIP1005 | 134 | 405 | 676 | 947 | 1218 | 1489 | 1760 | 2031 |
| TKIP1006 | 135 | 406 | 677 | 948 | 1219 | 1490 | 1761 | 2032 |
| TLGG1001 | 136 | 407 | 678 | 949 | 1220 | 1491 | 1762 | 2033 |
| TLIV1001 | 137 | 408 | 679 | 950 | 1221 | 1492 | 1763 | 2034 |
| TLIV1002 | 138 | 409 | 680 | 951 | 1222 | 1493 | 1764 | 2035 |
| TLIV1003 | 139 | 410 | 681 | 952 | 1223 | 1494 | 1765 | 2036 |
| TLIV1004 | 140 | 411 | 682 | 953 | 1224 | 1495 | 1766 | 2037 |
| TLUA1001 | 141 | 412 | 683 | 954 | 1225 | 1496 | 1767 | 2038 |
| TLUA1002 | 142 | 413 | 684 | 955 | 1226 | 1497 | 1768 | 2039 |
| TLUA1003 | 143 | 414 | 685 | 956 | 1227 | 1498 | 1769 | 2040 |
| TLUA1004 | 144 | 415 | 686 | 957 | 1228 | 1499 | 1770 | 2041 |
| TLUA1005 | 145 | 416 | 687 | 958 | 1229 | 1500 | 1771 | 2042 |
| TLUA1006 | 146 | 417 | 688 | 959 | 1230 | 1501 | 1772 | 2043 |
| TLUA1007 | 147 | 418 | 689 | 960 | 1231 | 1502 | 1773 | 2044 |
| TLUA1008 | 148 | 419 | 690 | 961 | 1232 | 1503 | 1774 | 2045 |
| TLUA1009 | 149 | 420 | 691 | 962 | 1233 | 1504 | 1775 | 2046 |
| TLUA1010 | 150 | 421 | 692 | 963 | 1234 | 1505 | 1776 | 2047 |
| TLUA1011 | 151 | 422 | 693 | 964 | 1235 | 1506 | 1777 | 2048 |
| TLUA1012 | 152 | 423 | 694 | 965 | 1236 | 1507 | 1778 | 2049 |
| TLUA1013 | 153 | 424 | 695 | 966 | 1237 | 1508 | 1779 | 2050 |
| TLUA1014 | 154 | 425 | 696 | 967 | 1238 | 1509 | 1780 | 2051 |
| TLUA1015 | 155 | 426 | 697 | 968 | 1239 | 1510 | 1781 | 2052 |
| TLUA1016 | 156 | 427 | 698 | 969 | 1240 | 1511 | 1782 | 2053 |
| TLUA1017 | 157 | 428 | 699 | 970 | 1241 | 1512 | 1783 | 2054 |
| TLUA1018 | 158 | 429 | 700 | 971 | 1242 | 1513 | 1784 | 2055 |
| TLUS1001 | 159 | 430 | 701 | 972 | 1243 | 1514 | 1785 | 2056 |
| TLUS1002 | 160 | 431 | 702 | 973 | 1244 | 1515 | 1786 | 2057 |
| TLUS1003 | 161 | 432 | 703 | 974 | 1245 | 1516 | 1787 | 2058 |
| TLUS1004 | 162 | 433 | 704 | 975 | 1246 | 1517 | 1788 | 2059 |
| TLUS1005 | 163 | 434 | 705 | 976 | 1247 | 1518 | 1789 | 2060 |
| TLUS1006 | 164 | 435 | 706 | 977 | 1248 | 1519 | 1790 | 2061 |
| TLUS1007 | 165 | 436 | 707 | 978 | 1249 | 1520 | 1791 | 2062 |
| TLUS1008 | 166 | 437 | 708 | 979 | 1250 | 1521 | 1792 | 2063 |
| TLUS1009 | 167 | 438 | 709 | 980 | 1251 | 1522 | 1793 | 2064 |
| TLUS1010 | 168 | 439 | 710 | 981 | 1252 | 1523 | 1794 | 2065 |
| TLUS1011 | 169 | 440 | 711 | 982 | 1253 | 1524 | 1795 | 2066 |
| TMEL1015 | 170 | 441 | 712 | 983 | 1254 | 1525 | 1796 | 2067 |
| TMEL1016 | 171 | 442 | 713 | 984 | 1255 | 1526 | 1797 | 2068 |
| TMEL1017 | 172 | 443 | 714 | 985 | 1256 | 1527 | 1798 | 2069 |
| TMEL1018 | 173 | 444 | 715 | 986 | 1257 | 1528 | 1799 | 2070 |
| TMEL1019 | 174 | 445 | 716 | 987 | 1258 | 1529 | 1800 | 2071 |
| TMEL1020 | 175 | 446 | 717 | 988 | 1259 | 1530 | 1801 | 2072 |
| TMEL1021 | 176 | 447 | 718 | 989 | 1260 | 1531 | 1802 | 2073 |
| TMEL1022 | 177 | 448 | 719 | 990 | 1261 | 1532 | 1803 | 2074 |
| TMEL1023 | 178 | 449 | 720 | 991 | 1262 | 1533 | 1804 | 2075 |
| TMEL1024 | 179 | 450 | 721 | 992 | 1263 | 1534 | 1805 | 2076 |
| TMEL1025 | 180 | 451 | 722 | 993 | 1264 | 1535 | 1806 | 2077 |
| TMEL1026 | 181 | 452 | 723 | 994 | 1265 | 1536 | 1807 | 2078 |
| TMEL1027 | 182 | 453 | 724 | 995 | 1266 | 1537 | 1808 | 2079 |
| TMEL1028 | 183 | 454 | 725 | 996 | 1267 | 1538 | 1809 | 2080 |
| TMEL1029 | 184 | 455 | 726 | 997 | 1268 | 1539 | 1810 | 2081 |
| TMEL1030 | 185 | 456 | 727 | 998 | 1269 | 1540 | 1811 | 2082 |
| TMEL1031 | 186 | 457 | 728 | 999 | 1270 | 1541 | 1812 | 2083 |
| TMEL1032 | 187 | 458 | 729 | 1000 | 1271 | 1542 | 1813 | 2084 |
| TMEL1033 | 188 | 459 | 730 | 1001 | 1272 | 1543 | 1814 | 2085 |
| TMEL1034 | 189 | 460 | 731 | 1002 | 1273 | 1544 | 1815 | 2086 |
| TMEL1035 | 190 | 461 | 732 | 1003 | 1274 | 1545 | 1816 | 2087 |
| TMEL1036 | 191 | 462 | 733 | 1004 | 1275 | 1546 | 1817 | 2088 |
| TMEL1037 | 192 | 463 | 734 | 1005 | 1276 | 1547 | 1818 | 2089 |
| TMEL1038 | 193 | 464 | 735 | 1006 | 1277 | 1548 | 1819 | 2090 |
| TMEL1039 | 194 | 465 | 736 | 1007 | 1278 | 1549 | 1820 | 2091 |
| TMEL1040 | 195 | 466 | 737 | 1008 | 1279 | 1550 | 1821 | 2092 |
| TMEL1041 | 196 | 467 | 738 | 1009 | 1280 | 1551 | 1822 | 2093 |
| TMES1001 | 197 | 468 | 739 | 1010 | 1281 | 1552 | 1823 | 2094 |
| TMES1002 | 198 | 469 | 740 | 1011 | 1282 | 1553 | 1824 | 2095 |
| TMES1003 | 199 | 470 | 741 | 1012 | 1283 | 1554 | 1825 | 2096 |
| TMES1004 | 200 | 471 | 742 | 1013 | 1284 | 1555 | 1826 | 2097 |
| TOVA1001 | 201 | 472 | 743 | 1014 | 1285 | 1556 | 1827 | 2098 |
| TOVA1002 | 202 | 473 | 744 | 1015 | 1286 | 1557 | 1828 | 2099 |
| TOVA1003 | 203 | 474 | 745 | 1016 | 1287 | 1558 | 1829 | 2100 |
| TOVA1004 | 204 | 475 | 746 | 1017 | 1288 | 1559 | 1830 | 2101 |
| TOVA1005 | 205 | 476 | 747 | 1018 | 1289 | 1560 | 1831 | 2102 |
| TOVA1006 | 206 | 477 | 748 | 1019 | 1290 | 1561 | 1832 | 2103 |
| TOVA1007 | 207 | 478 | 749 | 1020 | 1291 | 1562 | 1833 | 2104 |
| TOVA1008 | 208 | 479 | 750 | 1021 | 1292 | 1563 | 1834 | 2105 |
| TPAN1001 | 209 | 480 | 751 | 1022 | 1293 | 1564 | 1835 | 2106 |
| TPAN1002 | 210 | 481 | 752 | 1023 | 1294 | 1565 | 1836 | 2107 |
| TPAN1003 | 211 | 482 | 753 | 1024 | 1295 | 1566 | 1837 | 2108 |
| TPAN1004 | 212 | 483 | 754 | 1025 | 1296 | 1567 | 1838 | 2109 |
| TPAN1005 | 213 | 484 | 755 | 1026 | 1297 | 1568 | 1839 | 2110 |
| TPAN1006 | 214 | 485 | 756 | 1027 | 1298 | 1569 | 1840 | 2111 |
| TPAN1007 | 215 | 486 | 757 | 1028 | 1299 | 1570 | 1841 | 2112 |
| TPHE1001 | 216 | 487 | 758 | 1029 | 1300 | 1571 | 1842 | 2113 |
| TPRO1001 | 217 | 488 | 759 | 1030 | 1301 | 1572 | 1843 | 2114 |
| TPRO1002 | 218 | 489 | 760 | 1031 | 1302 | 1573 | 1844 | 2115 |
| TPRO1003 | 219 | 490 | 761 | 1032 | 1303 | 1574 | 1845 | 2116 |
| TREC1001 | 220 | 491 | 762 | 1033 | 1304 | 1575 | 1846 | 2117 |
| TREC1002 | 221 | 492 | 763 | 1034 | 1305 | 1576 | 1847 | 2118 |
| TREC1003 | 222 | 493 | 764 | 1035 | 1306 | 1577 | 1848 | 2119 |
| TSAR1001 | 223 | 494 | 765 | 1036 | 1307 | 1578 | 1849 | 2120 |
| TSAR1002 | 224 | 495 | 766 | 1037 | 1308 | 1579 | 1850 | 2121 |
| TSAR1003 | 225 | 496 | 767 | 1038 | 1309 | 1580 | 1851 | 2122 |
| TSAR1004 | 226 | 497 | 768 | 1039 | 1310 | 1581 | 1852 | 2123 |
| TSAR1005 | 227 | 498 | 769 | 1040 | 1311 | 1582 | 1853 | 2124 |
| TSAR1006 | 228 | 499 | 770 | 1041 | 1312 | 1583 | 1854 | 2125 |
| TSAR1007 | 229 | 500 | 771 | 1042 | 1313 | 1584 | 1855 | 2126 |
| TSAR1008 | 230 | 501 | 772 | 1043 | 1314 | 1585 | 1856 | 2127 |
| TSTO1001 | 231 | 502 | 773 | 1044 | 1315 | 1586 | 1857 | 2128 |
| TSTO1002 | 232 | 503 | 774 | 1045 | 1316 | 1587 | 1858 | 2129 |
| TSTO1003 | 233 | 504 | 775 | 1046 | 1317 | 1588 | 1859 | 2130 |
| TSTO1004 | 234 | 505 | 776 | 1047 | 1318 | 1589 | 1860 | 2131 |
| TSTO1005 | 235 | 506 | 777 | 1048 | 1319 | 1590 | 1861 | 2132 |
| TSTO1006 | 236 | 507 | 778 | 1049 | 1320 | 1591 | 1862 | 2133 |
| TSTO1007 | 237 | 508 | 779 | 1050 | 1321 | 1592 | 1863 | 2134 |
| TSTO1008 | 238 | 509 | 780 | 1051 | 1322 | 1593 | 1864 | 2135 |
| TSTO1009 | 239 | 510 | 781 | 1052 | 1323 | 1594 | 1865 | 2136 |
| TSTO1010 | 240 | 511 | 782 | 1053 | 1324 | 1595 | 1866 | 2137 |
| TTES1001 | 241 | 512 | 783 | 1054 | 1325 | 1596 | 1867 | 2138 |
| TTES1002 | 242 | 513 | 784 | 1055 | 1326 | 1597 | 1868 | 2139 |
| TTES1003 | 243 | 514 | 785 | 1056 | 1327 | 1598 | 1869 | 2140 |
| TTES1004 | 244 | 515 | 786 | 1057 | 1328 | 1599 | 1870 | 2141 |
| TTES1005 | 245 | 516 | 787 | 1058 | 1329 | 1600 | 1871 | 2142 |
| TTES1006 | 246 | 517 | 788 | 1059 | 1330 | 1601 | 1872 | 2143 |
| TTES1007 | 247 | 518 | 789 | 1060 | 1331 | 1602 | 1873 | 2144 |
| TTES1008 | 248 | 519 | 790 | 1061 | 1332 | 1603 | 1874 | 2145 |
| TTES1009 | 249 | 520 | 791 | 1062 | 1333 | 1604 | 1875 | 2146 |
| TTES1010 | 250 | 521 | 792 | 1063 | 1334 | 1605 | 1876 | 2147 |
| TTES1011 | 251 | 522 | 793 | 1064 | 1335 | 1606 | 1877 | 2148 |
| TTES1012 | 252 | 523 | 794 | 1065 | 1336 | 1607 | 1878 | 2149 |
| TTHY1001 | 253 | 524 | 795 | 1066 | 1337 | 1608 | 1879 | 2150 |
| TTHY1002 | 254 | 525 | 796 | 1067 | 1338 | 1609 | 1880 | 2151 |
| TTHY1003 | 255 | 526 | 797 | 1068 | 1339 | 1610 | 1881 | 2152 |
| TTHY1004 | 256 | 527 | 798 | 1069 | 1340 | 1611 | 1882 | 2153 |
| TUCE1001 | 257 | 528 | 799 | 1070 | 1341 | 1612 | 1883 | 2154 |
| TUCE1002 | 258 | 529 | 800 | 1071 | 1342 | 1613 | 1884 | 2155 |
| TUCE1003 | 259 | 530 | 801 | 1072 | 1343 | 1614 | 1885 | 2156 |
| TUCE1004 | 260 | 531 | 802 | 1073 | 1344 | 1615 | 1886 | 2157 |
| TUCE1005 | 261 | 532 | 803 | 1074 | 1345 | 1616 | 1887 | 2158 |
| TUCE1006 | 262 | 533 | 804 | 1075 | 1346 | 1617 | 1888 | 2159 |
| TUCE1007 | 263 | 534 | 805 | 1076 | 1347 | 1618 | 1889 | 2160 |
| TUCE1008 | 264 | 535 | 806 | 1077 | 1348 | 1619 | 1890 | 2161 |
| TUCE1009 | 265 | 536 | 807 | 1078 | 1349 | 1620 | 1891 | 2162 |
| TUCE1010 | 266 | 537 | 808 | 1079 | 1350 | 1621 | 1892 | 2163 |
| TUCS1001 | 267 | 538 | 809 | 1080 | 1351 | 1622 | 1893 | 2164 |
| TUCS1002 | 268 | 539 | 810 | 1081 | 1352 | 1623 | 1894 | 2165 |
| TUCS1003 | 269 | 540 | 811 | 1082 | 1353 | 1624 | 1895 | 2166 |
| TUVM1001 | 270 | 541 | 812 | 1083 | 1354 | 1625 | 1896 | 2167 |
| TUVM1002 | 271 | 542 | 813 | 1084 | 1355 | 1626 | 1897 | 2168 |

Lists SEQ ID Nos of exemplary amino acid sequences of heavy chain, light chain, and complementarity-determining regions of the antibodies disclosed herein or antigen binding fragment thereof. Corresponding amino acid sequences are provided in the sequence listing submitted herewith

TABLE 2

| | SEQ ID NO: | | | | | | | |
|---|---|---|---|---|---|---|---|---|
| | Variable | | | | | | | |
| | Region | | CDR1 | | CDR2 | | CDR3 | |
| | Heavy | Light | Heavy | Light | Heavy | Light | Heavy | Light |
| Antibody | chain | chain | chain | chain | chain | chain | chain | chain |
| name | (V_{H}) | (V_{L}) | (CDR-H1) | (CDR-L1) | (CDR-H2) | (CDR-L2) | (CDR-H3) | (CDR-L3) |
| TBLA1001 | 2169 | 2440 | 2711 | 2982 | 3253 | 3524 | 3795 | 4066 |
| TBLA1002 | 2170 | 2441 | 2712 | 2983 | 3254 | 3525 | 3796 | 4067 |
| TBLA1003 | 2171 | 2442 | 2713 | 2984 | 3255 | 3526 | 3797 | 4068 |
| TBLA1004 | 2172 | 2443 | 2714 | 2985 | 3256 | 3527 | 3798 | 4069 |
| TBLA1005 | 2173 | 2444 | 2715 | 2986 | 3257 | 3528 | 3799 | 4070 |
| TBLA1006 | 2174 | 2445 | 2716 | 2987 | 3258 | 3529 | 3800 | 4071 |
| TBLA1007 | 2175 | 2446 | 2717 | 2988 | 3259 | 3530 | 3801 | 4072 |
| TBLA1008 | 2176 | 2447 | 2718 | 2989 | 3260 | 3531 | 3802 | 4073 |
| TBLA1009 | 2177 | 2448 | 2719 | 2990 | 3261 | 3532 | 3803 | 4074 |
| TBLA1010 | 2178 | 2449 | 2720 | 2991 | 3262 | 3533 | 3804 | 4075 |
| TBLA1011 | 2179 | 2450 | 2721 | 2992 | 3263 | 3534 | 3805 | 4076 |
| TBLA1012 | 2180 | 2451 | 2722 | 2993 | 3264 | 3535 | 3806 | 4077 |
| TBLA1013 | 2181 | 2452 | 2723 | 2994 | 3265 | 3536 | 3807 | 4078 |
| TBRE1001 | 2182 | 2453 | 2724 | 2995 | 3266 | 3537 | 3808 | 4079 |
| TBRE1002 | 2183 | 2454 | 2725 | 2996 | 3267 | 3538 | 3809 | 4080 |
| TBRE1003 | 2184 | 2455 | 2726 | 2997 | 3268 | 3539 | 3810 | 4081 |
| TBRE1004 | 2185 | 2456 | 2727 | 2998 | 3269 | 3540 | 3811 | 4082 |
| TBRE1005 | 2186 | 2457 | 2728 | 2999 | 3270 | 3541 | 3812 | 4083 |
| TBRE1006 | 2187 | 2458 | 2729 | 3000 | 3271 | 3542 | 3813 | 4084 |
| TBRE1007 | 2188 | 2459 | 2730 | 3001 | 3272 | 3543 | 3814 | 4085 |
| TBRE1008 | 2189 | 2460 | 2731 | 3002 | 3273 | 3544 | 3815 | 4086 |
| TBRE1009 | 2190 | 2461 | 2732 | 3003 | 3274 | 3545 | 3816 | 4087 |
| TBRE1010 | 2191 | 2462 | 2733 | 3004 | 3275 | 3546 | 3817 | 4088 |
| TBRE1011 | 2192 | 2463 | 2734 | 3005 | 3276 | 3547 | 3818 | 4089 |
| TBRE1012 | 2193 | 2464 | 2735 | 3006 | 3277 | 3548 | 3819 | 4090 |
| TBRE1013 | 2194 | 2465 | 2736 | 3007 | 3278 | 3549 | 3820 | 4091 |
| TBRE1014 | 2195 | 2466 | 2737 | 3008 | 3279 | 3550 | 3821 | 4092 |
| TBRE1015 | 2196 | 2467 | 2738 | 3009 | 3280 | 3551 | 3822 | 4093 |
| TBRE1016 | 2197 | 2468 | 2739 | 3010 | 3281 | 3552 | 3823 | 4094 |
| TBRE1017 | 2198 | 2469 | 2740 | 3011 | 3282 | 3553 | 3824 | 4095 |
| TBRE1018 | 2199 | 2470 | 2741 | 3012 | 3283 | 3554 | 3825 | 4096 |
| TBRE1019 | 2200 | 2471 | 2742 | 3013 | 3284 | 3555 | 3826 | 4097 |
| TBRE1020 | 2201 | 2472 | 2743 | 3014 | 3285 | 3556 | 3827 | 4098 |
| TBRE1021 | 2202 | 2473 | 2744 | 3015 | 3286 | 3557 | 3828 | 4099 |
| TBRE1022 | 2203 | 2474 | 2745 | 3016 | 3287 | 3558 | 3829 | 4100 |
| TBRE1023 | 2204 | 2475 | 2746 | 3017 | 3288 | 3559 | 3830 | 4101 |
| TBRE1024 | 2205 | 2476 | 2747 | 3018 | 3289 | 3560 | 3831 | 4102 |
| TBRE1025 | 2206 | 2477 | 2748 | 3019 | 3290 | 3561 | 3832 | 4103 |
| TBRE1026 | 2207 | 2478 | 2749 | 3020 | 3291 | 3562 | 3833 | 4104 |
| TBRE1027 | 2208 | 2479 | 2750 | 3021 | 3292 | 3563 | 3834 | 4105 |
| TBRE1028 | 2209 | 2480 | 2751 | 3022 | 3293 | 3564 | 3835 | 4106 |
| TBRE1029 | 2210 | 2481 | 2752 | 3023 | 3294 | 3565 | 3836 | 4107 |
| TBRE1030 | 2211 | 2482 | 2753 | 3024 | 3295 | 3566 | 3837 | 4108 |
| TBRE1031 | 2212 | 2483 | 2754 | 3025 | 3296 | 3567 | 3838 | 4109 |
| TBRE1032 | 2213 | 2484 | 2755 | 3026 | 3297 | 3568 | 3839 | 4110 |
| TBRE1033 | 2214 | 2485 | 2756 | 3027 | 3298 | 3569 | 3840 | 4111 |
| TBRE1034 | 2215 | 2486 | 2757 | 3028 | 3299 | 3570 | 3841 | 4112 |
| TBRE1035 | 2216 | 2487 | 2758 | 3029 | 3300 | 3571 | 3842 | 4113 |
| TBRE1036 | 2217 | 2488 | 2759 | 3030 | 3301 | 3572 | 3843 | 4114 |
| TBRE1037 | 2218 | 2489 | 2760 | 3031 | 3302 | 3573 | 3844 | 4115 |
| TBRE1038 | 2219 | 2490 | 2761 | 3032 | 3303 | 3574 | 3845 | 4116 |
| TBRE1039 | 2220 | 2491 | 2762 | 3033 | 3304 | 3575 | 3846 | 4117 |
| TBRE1040 | 2221 | 2492 | 2763 | 3034 | 3305 | 3576 | 3847 | 4118 |
| TBRE1041 | 2222 | 2493 | 2764 | 3035 | 3306 | 3577 | 3848 | 4119 |
| TBRE1042 | 2223 | 2494 | 2765 | 3036 | 3307 | 3578 | 3849 | 4120 |
| TBRE1043 | 2224 | 2495 | 2766 | 3037 | 3308 | 3579 | 3850 | 4121 |
| TBRE1044 | 2225 | 2496 | 2767 | 3038 | 3309 | 3580 | 3851 | 4122 |
| TBRE1045 | 2226 | 2497 | 2768 | 3039 | 3310 | 3581 | 3852 | 4123 |
| TBRE1046 | 2227 | 2498 | 2769 | 3040 | 3311 | 3582 | 3853 | 4124 |
| TBRE1047 | 2228 | 2499 | 2770 | 3041 | 3312 | 3583 | 3854 | 4125 |
| TBRE1048 | 2229 | 2500 | 2771 | 3042 | 3313 | 3584 | 3855 | 4126 |
| TBRE1049 | 2230 | 2501 | 2772 | 3043 | 3314 | 3585 | 3856 | 4127 |
| TBRE1050 | 2231 | 2502 | 2773 | 3044 | 3315 | 3586 | 3857 | 4128 |
| TBRE1051 | 2232 | 2503 | 2774 | 3045 | 3316 | 3587 | 3858 | 4129 |
| TBRE1052 | 2233 | 2504 | 2775 | 3046 | 3317 | 3588 | 3859 | 4130 |
| TBRE1053 | 2234 | 2505 | 2776 | 3047 | 3318 | 3589 | 3860 | 4131 |
| TBRE1054 | 2235 | 2506 | 2777 | 3048 | 3319 | 3590 | 3861 | 4132 |
| TBRE1055 | 2236 | 2507 | 2778 | 3049 | 3320 | 3591 | 3862 | 4133 |
| TBRE1056 | 2237 | 2508 | 2779 | 3050 | 3321 | 3592 | 3863 | 4134 |
| TBRE1057 | 2238 | 2509 | 2780 | 3051 | 3322 | 3593 | 3864 | 4135 |
| TBRE1058 | 2239 | 2510 | 2781 | 3052 | 3323 | 3594 | 3865 | 4136 |
| TCER1001 | 2240 | 2511 | 2782 | 3053 | 3324 | 3595 | 3866 | 4137 |
| TCER1002 | 2241 | 2512 | 2783 | 3054 | 3325 | 3596 | 3867 | 4138 |
| TCER1003 | 2242 | 2513 | 2784 | 3055 | 3326 | 3597 | 3868 | 4139 |
| TCER1004 | 2243 | 2514 | 2785 | 3056 | 3327 | 3598 | 3869 | 4140 |
| TCER1005 | 2244 | 2515 | 2786 | 3057 | 3328 | 3599 | 3870 | 4141 |
| TCER1006 | 2245 | 2516 | 2787 | 3058 | 3329 | 3600 | 3871 | 4142 |
| TCER1007 | 2246 | 2517 | 2788 | 3059 | 3330 | 3601 | 3872 | 4143 |
| TCH01001 | 2247 | 2518 | 2789 | 3060 | 3331 | 3602 | 3873 | 4144 |
| TCOL1001 | 2248 | 2519 | 2790 | 3061 | 3332 | 3603 | 3874 | 4145 |
| TCOL1002 | 2249 | 2520 | 2791 | 3062 | 3333 | 3604 | 3875 | 4146 |
| TCOL1003 | 2250 | 2521 | 2792 | 3063 | 3334 | 3605 | 3876 | 4147 |
| TCOL1004 | 2251 | 2522 | 2793 | 3064 | 3335 | 3606 | 3877 | 4148 |
| TCOL1005 | 2252 | 2523 | 2794 | 3065 | 3336 | 3607 | 3878 | 4149 |
| TCOL1006 | 2253 | 2524 | 2795 | 3066 | 3337 | 3608 | 3879 | 4150 |
| TCOL1007 | 2254 | 2525 | 2796 | 3067 | 3338 | 3609 | 3880 | 4151 |
| TCOL1008 | 2255 | 2526 | 2797 | 3068 | 3339 | 3610 | 3881 | 4152 |
| TCOL1009 | 2256 | 2527 | 2798 | 3069 | 3340 | 3611 | 3882 | 4153 |
| TESO1001 | 2257 | 2528 | 2799 | 3070 | 3341 | 3612 | 3883 | 4154 |
| TESO1002 | 2258 | 2529 | 2800 | 3071 | 3342 | 3613 | 3884 | 4155 |
| TESO1003 | 2259 | 2530 | 2801 | 3072 | 3343 | 3614 | 3885 | 4156 |
| TESO1004 | 2260 | 2531 | 2802 | 3073 | 3344 | 3615 | 3886 | 4157 |
| TESO1005 | 2261 | 2532 | 2803 | 3074 | 3345 | 3616 | 3887 | 4158 |
| TESO1006 | 2262 | 2533 | 2804 | 3075 | 3346 | 3617 | 3888 | 4159 |
| TESO1007 | 2263 | 2534 | 2805 | 3076 | 3347 | 3618 | 3889 | 4160 |
| THNS1001 | 2264 | 2535 | 2806 | 3077 | 3348 | 3619 | 3890 | 4161 |
| THNS1002 | 2265 | 2536 | 2807 | 3078 | 3349 | 3620 | 3891 | 4162 |
| THNS1003 | 2266 | 2537 | 2808 | 3079 | 3350 | 3621 | 3892 | 4163 |
| THNS1004 | 2267 | 2538 | 2809 | 3080 | 3351 | 3622 | 3893 | 4164 |
| THNS1005 | 2268 | 2539 | 2810 | 3081 | 3352 | 3623 | 3894 | 4165 |
| THNS1006 | 2269 | 2540 | 2811 | 3082 | 3353 | 3624 | 3895 | 4166 |
| THNS1007 | 2270 | 2541 | 2812 | 3083 | 3354 | 3625 | 3896 | 4167 |
| THNS1008 | 2271 | 2542 | 2813 | 3084 | 3355 | 3626 | 3897 | 4168 |
| THNS1009 | 2272 | 2543 | 2814 | 3085 | 3356 | 3627 | 3898 | 4169 |
| THNS1010 | 2273 | 2544 | 2815 | 3086 | 3357 | 3628 | 3899 | 4170 |
| THNS1011 | 2274 | 2545 | 2816 | 3087 | 3358 | 3629 | 3900 | 4171 |
| THNS1012 | 2275 | 2546 | 2817 | 3088 | 3359 | 3630 | 3901 | 4172 |
| THNS1013 | 2276 | 2547 | 2818 | 3089 | 3360 | 3631 | 3902 | 4173 |
| THNS1014 | 2277 | 2548 | 2819 | 3090 | 3361 | 3632 | 3903 | 4174 |
| TKIC1001 | 2278 | 2549 | 2820 | 3091 | 3362 | 3633 | 3904 | 4175 |
| TKIC1002 | 2279 | 2550 | 2821 | 3092 | 3363 | 3634 | 3905 | 4176 |
| TKIC1003 | 2280 | 2551 | 2822 | 3093 | 3364 | 3635 | 3906 | 4177 |
| TKIC1004 | 2281 | 2552 | 2823 | 3094 | 3365 | 3636 | 3907 | 4178 |
| TKIC1005 | 2282 | 2553 | 2824 | 3095 | 3366 | 3637 | 3908 | 4179 |
| TKIC1006 | 2283 | 2554 | 2825 | 3096 | 3367 | 3638 | 3909 | 4180 |
| TKIC1007 | 2284 | 2555 | 2826 | 3097 | 3368 | 3639 | 3910 | 4181 |
| TKIC1008 | 2285 | 2556 | 2827 | 3098 | 3369 | 3640 | 3911 | 4182 |
| TKIC1009 | 2286 | 2557 | 2828 | 3099 | 3370 | 3641 | 3912 | 4183 |
| TKIC1010 | 2287 | 2558 | 2829 | 3100 | 3371 | 3642 | 3913 | 4184 |
| TKIC1011 | 2288 | 2559 | 2830 | 3101 | 3372 | 3643 | 3914 | 4185 |
| TKIC1012 | 2289 | 2560 | 2831 | 3102 | 3373 | 3644 | 3915 | 4186 |
| TKIC1013 | 2290 | 2561 | 2832 | 3103 | 3374 | 3645 | 3916 | 4187 |
| TKIC1014 | 2291 | 2562 | 2833 | 3104 | 3375 | 3646 | 3917 | 4188 |
| TKIC1015 | 2292 | 2563 | 2834 | 3105 | 3376 | 3647 | 3918 | 4189 |
| TKIC1016 | 2293 | 2564 | 2835 | 3106 | 3377 | 3648 | 3919 | 4190 |
| TKIC1017 | 2294 | 2565 | 2836 | 3107 | 3378 | 3649 | 3920 | 4191 |
| TKIC1018 | 2295 | 2566 | 2837 | 3108 | 3379 | 3650 | 3921 | 4192 |
| TKIC1019 | 2296 | 2567 | 2838 | 3109 | 3380 | 3651 | 3922 | 4193 |
| TKIC1020 | 2297 | 2568 | 2839 | 3110 | 3381 | 3652 | 3923 | 4194 |
| TKIP1001 | 2298 | 2569 | 2840 | 3111 | 3382 | 3653 | 3924 | 4195 |
| TKIP1002 | 2299 | 2570 | 2841 | 3112 | 3383 | 3654 | 3925 | 4196 |
| TKIP1003 | 2300 | 2571 | 2842 | 3113 | 3384 | 3655 | 3926 | 4197 |
| TKIP1004 | 2301 | 2572 | 2843 | 3114 | 3385 | 3656 | 3927 | 4198 |
| TKIP1005 | 2302 | 2573 | 2844 | 3115 | 3386 | 3657 | 3928 | 4199 |
| TKIP1006 | 2303 | 2574 | 2845 | 3116 | 3387 | 3658 | 3929 | 4200 |
| TLGG1001 | 2304 | 2575 | 2846 | 3117 | 3388 | 3659 | 3930 | 4201 |
| TLIV1001 | 2305 | 2576 | 2847 | 3118 | 3389 | 3660 | 3931 | 4202 |
| TLIV1002 | 2306 | 2577 | 2848 | 3119 | 3390 | 3661 | 3932 | 4203 |
| TLIV1003 | 2307 | 2578 | 2849 | 3120 | 3391 | 3662 | 3933 | 4204 |
| TLIV1004 | 2308 | 2579 | 2850 | 3121 | 3392 | 3663 | 3934 | 4205 |
| TLUA1001 | 2309 | 2580 | 2851 | 3122 | 3393 | 3664 | 3935 | 4206 |
| TLUA1002 | 2310 | 2581 | 2852 | 3123 | 3394 | 3665 | 3936 | 4207 |
| TLUA1003 | 2311 | 2582 | 2853 | 3124 | 3395 | 3666 | 3937 | 4208 |
| TLUA1004 | 2312 | 2583 | 2854 | 3125 | 3396 | 3667 | 3938 | 4209 |
| TLUA1005 | 2313 | 2584 | 2855 | 3126 | 3397 | 3668 | 3939 | 4210 |
| TLUA1006 | 2314 | 2585 | 2856 | 3127 | 3398 | 3669 | 3940 | 4211 |
| TLUA1007 | 2315 | 2586 | 2857 | 3128 | 3399 | 3670 | 3941 | 4212 |
| TLUA1008 | 2316 | 2587 | 2858 | 3129 | 3400 | 3671 | 3942 | 4213 |
| TLUA1009 | 2317 | 2588 | 2859 | 3130 | 3401 | 3672 | 3943 | 4214 |
| TLUA1010 | 2318 | 2589 | 2860 | 3131 | 3402 | 3673 | 3944 | 4215 |
| TLUA1011 | 2319 | 2590 | 2861 | 3132 | 3403 | 3674 | 3945 | 4216 |
| TLUA1012 | 2320 | 2591 | 2862 | 3133 | 3404 | 3675 | 3946 | 4217 |
| TLUA1013 | 2321 | 2592 | 2863 | 3134 | 3405 | 3676 | 3947 | 4218 |
| TLUA1014 | 2322 | 2593 | 2864 | 3135 | 3406 | 3677 | 3948 | 4219 |
| TLUA1015 | 2323 | 2594 | 2865 | 3136 | 3407 | 3678 | 3949 | 4220 |
| TLUA1016 | 2324 | 2595 | 2866 | 3137 | 3408 | 3679 | 3950 | 4221 |
| TLUA1017 | 2325 | 2596 | 2867 | 3138 | 3409 | 3680 | 3951 | 4222 |
| TLUA1018 | 2326 | 2597 | 2868 | 3139 | 3410 | 3681 | 3952 | 4223 |
| TLUS1001 | 2327 | 2598 | 2869 | 3140 | 3411 | 3682 | 3953 | 4224 |
| TLUS1002 | 2328 | 2599 | 2870 | 3141 | 3412 | 3683 | 3954 | 4225 |
| TLUS1003 | 2329 | 2600 | 2871 | 3142 | 3413 | 3684 | 3955 | 4226 |
| TLUS1004 | 2330 | 2601 | 2872 | 3143 | 3414 | 3685 | 3956 | 4227 |
| TLUS1005 | 2331 | 2602 | 2873 | 3144 | 3415 | 3686 | 3957 | 4228 |
| TLUS1006 | 2332 | 2603 | 2874 | 3145 | 3416 | 3687 | 3958 | 4229 |
| TLUS1007 | 2333 | 2604 | 2875 | 3146 | 3417 | 3688 | 3959 | 4230 |
| TLUS1008 | 2334 | 2605 | 2876 | 3147 | 3418 | 3689 | 3960 | 4231 |
| TLUS1009 | 2335 | 2606 | 2877 | 3148 | 3419 | 3690 | 3961 | 4232 |
| TLUS1010 | 2336 | 2607 | 2878 | 3149 | 3420 | 3691 | 3962 | 4233 |
| TLUS1011 | 2337 | 2608 | 2879 | 3150 | 3421 | 3692 | 3963 | 4234 |
| TMEL1015 | 2338 | 2609 | 2880 | 3151 | 3422 | 3693 | 3964 | 4235 |
| TMEL1016 | 2339 | 2610 | 2881 | 3152 | 3423 | 3694 | 3965 | 4236 |
| TMEL1017 | 2340 | 2611 | 2882 | 3153 | 3424 | 3695 | 3966 | 4237 |
| TMEL1018 | 2341 | 2612 | 2883 | 3154 | 3425 | 3696 | 3967 | 4238 |
| TMEL1019 | 2342 | 2613 | 2884 | 3155 | 3426 | 3697 | 3968 | 4239 |
| TMEL1020 | 2343 | 2614 | 2885 | 3156 | 3427 | 3698 | 3969 | 4240 |
| TMEL1021 | 2344 | 2615 | 2886 | 3157 | 3428 | 3699 | 3970 | 4241 |
| TMEL1022 | 2345 | 2616 | 2887 | 3158 | 3429 | 3700 | 3971 | 4242 |
| TMEL1023 | 2346 | 2617 | 2888 | 3159 | 3430 | 3701 | 3972 | 4243 |
| TMEL1024 | 2347 | 2618 | 2889 | 3160 | 3431 | 3702 | 3973 | 4244 |
| TMEL1025 | 2348 | 2619 | 2890 | 3161 | 3432 | 3703 | 3974 | 4245 |
| TMEL1026 | 2349 | 2620 | 2891 | 3162 | 3433 | 3704 | 3975 | 4246 |
| TMEL1027 | 2350 | 2621 | 2892 | 3163 | 3434 | 3705 | 3976 | 4247 |
| TMEL1028 | 2351 | 2622 | 2893 | 3164 | 3435 | 3706 | 3977 | 4248 |
| TMEL1029 | 2352 | 2623 | 2894 | 3165 | 3436 | 3707 | 3978 | 4249 |
| TMEL1030 | 2353 | 2624 | 2895 | 3166 | 3437 | 3708 | 3979 | 4250 |
| TMEL1031 | 2354 | 2625 | 2896 | 3167 | 3438 | 3709 | 3980 | 4251 |
| TMEL1032 | 2355 | 2626 | 2897 | 3168 | 3439 | 3710 | 3981 | 4252 |
| TMEL1033 | 2356 | 2627 | 2898 | 3169 | 3440 | 3711 | 3982 | 4253 |
| TMEL1034 | 2357 | 2628 | 2899 | 3170 | 3441 | 3712 | 3983 | 4254 |
| TMEL1035 | 2358 | 2629 | 2900 | 3171 | 3442 | 3713 | 3984 | 4255 |
| TMEL1036 | 2359 | 2630 | 2901 | 3172 | 3443 | 3714 | 3985 | 4256 |
| TMEL1037 | 2360 | 2631 | 2902 | 3173 | 3444 | 3715 | 3986 | 4257 |
| TMEL1038 | 2361 | 2632 | 2903 | 3174 | 3445 | 3716 | 3987 | 4258 |
| TMEL1039 | 2362 | 2633 | 2904 | 3175 | 3446 | 3717 | 3988 | 4259 |
| TMEL1040 | 2363 | 2634 | 2905 | 3176 | 3447 | 3718 | 3989 | 4260 |
| TMEL1041 | 2364 | 2635 | 2906 | 3177 | 3448 | 3719 | 3990 | 4261 |
| TMES1001 | 2365 | 2636 | 2907 | 3178 | 3449 | 3720 | 3991 | 4262 |
| TMES1002 | 2366 | 2637 | 2908 | 3179 | 3450 | 3721 | 3992 | 4263 |
| TMES1003 | 2367 | 2638 | 2909 | 3180 | 3451 | 3722 | 3993 | 4264 |
| TMES1004 | 2368 | 2639 | 2910 | 3181 | 3452 | 3723 | 3994 | 4265 |
| TOVA1001 | 2369 | 2640 | 2911 | 3182 | 3453 | 3724 | 3995 | 4266 |
| TOVA1002 | 2370 | 2641 | 2912 | 3183 | 3454 | 3725 | 3996 | 4267 |
| TOVA1003 | 2371 | 2642 | 2913 | 3184 | 3455 | 3726 | 3997 | 4268 |
| TOVA1004 | 2372 | 2643 | 2914 | 3185 | 3456 | 3727 | 3998 | 4269 |
| TOVA1005 | 2373 | 2644 | 2915 | 3186 | 3457 | 3728 | 3999 | 4270 |
| TOVA1006 | 2374 | 2645 | 2916 | 3187 | 3458 | 3729 | 4000 | 4271 |
| TOVA1007 | 2375 | 2646 | 2917 | 3188 | 3459 | 3730 | 4001 | 4272 |
| TOVA1008 | 2376 | 2647 | 2918 | 3189 | 3460 | 3731 | 4002 | 4273 |
| TPAN1001 | 2377 | 2648 | 2919 | 3190 | 3461 | 3732 | 4003 | 4274 |
| TPAN1002 | 2378 | 2649 | 2920 | 3191 | 3462 | 3733 | 4004 | 4275 |
| TPAN1003 | 2379 | 2650 | 2921 | 3192 | 3463 | 3734 | 4005 | 4276 |
| TPAN1004 | 2380 | 2651 | 2922 | 3193 | 3464 | 3735 | 4006 | 4277 |
| TPAN1005 | 2381 | 2652 | 2923 | 3194 | 3465 | 3736 | 4007 | 4278 |
| TPAN1006 | 2382 | 2653 | 2924 | 3195 | 3466 | 3737 | 4008 | 4279 |
| TPAN1007 | 2383 | 2654 | 2925 | 3196 | 3467 | 3738 | 4009 | 4280 |
| TPHE1001 | 2384 | 2655 | 2926 | 3197 | 3468 | 3739 | 4010 | 4281 |
| TPRO1001 | 2385 | 2656 | 2927 | 3198 | 3469 | 3740 | 4011 | 4282 |
| TPRO1002 | 2386 | 2657 | 2928 | 3199 | 3470 | 3741 | 4012 | 4283 |
| TPRO1003 | 2387 | 2658 | 2929 | 3200 | 3471 | 3742 | 4013 | 4284 |
| TREC1001 | 2388 | 2659 | 2930 | 3201 | 3472 | 3743 | 4014 | 4285 |
| TREC1002 | 2389 | 2660 | 2931 | 3202 | 3473 | 3744 | 4015 | 4286 |
| TREC1003 | 2390 | 2661 | 2932 | 3203 | 3474 | 3745 | 4016 | 4287 |
| TSAR1001 | 2391 | 2662 | 2933 | 3204 | 3475 | 3746 | 4017 | 4288 |
| TSAR1002 | 2392 | 2663 | 2934 | 3205 | 3476 | 3747 | 4018 | 4289 |
| TSAR1003 | 2393 | 2664 | 2935 | 3206 | 3477 | 3748 | 4019 | 4290 |
| TSAR1004 | 2394 | 2665 | 2936 | 3207 | 3478 | 3749 | 4020 | 4291 |
| TSAR1005 | 2395 | 2666 | 2937 | 3208 | 3479 | 3750 | 4021 | 4292 |
| TSAR1006 | 2396 | 2667 | 2938 | 3209 | 3480 | 3751 | 4022 | 4293 |
| TSAR1007 | 2397 | 2668 | 2939 | 3210 | 3481 | 3752 | 4023 | 4294 |
| TSAR1008 | 2398 | 2669 | 2940 | 3211 | 3482 | 3753 | 4024 | 4295 |
| TSTO1001 | 2399 | 2670 | 2941 | 3212 | 3483 | 3754 | 4025 | 4296 |
| TSTO1002 | 2400 | 2671 | 2942 | 3213 | 3484 | 3755 | 4026 | 4297 |
| TSTO1003 | 2401 | 2672 | 2943 | 3214 | 3485 | 3756 | 4027 | 4298 |
| TSTO1004 | 2402 | 2673 | 2944 | 3215 | 3486 | 3757 | 4028 | 4299 |
| TSTO1005 | 2403 | 2674 | 2945 | 3216 | 3487 | 3758 | 4029 | 4300 |
| TSTO1006 | 2404 | 2675 | 2946 | 3217 | 3488 | 3759 | 4030 | 4301 |
| TSTO1007 | 2405 | 2676 | 2947 | 3218 | 3489 | 3760 | 4031 | 4302 |
| TSTO1008 | 2406 | 2677 | 2948 | 3219 | 3490 | 3761 | 4032 | 4303 |
| TSTO1009 | 2407 | 2678 | 2949 | 3220 | 3491 | 3762 | 4033 | 4304 |
| TSTO1010 | 2408 | 2679 | 2950 | 3221 | 3492 | 3763 | 4034 | 4305 |
| TTES1001 | 2409 | 2680 | 2951 | 3222 | 3493 | 3764 | 4035 | 4306 |
| TTES1002 | 2410 | 2681 | 2952 | 3223 | 3494 | 3765 | 4036 | 4307 |
| TTES1003 | 2411 | 2682 | 2953 | 3224 | 3495 | 3766 | 4037 | 4308 |
| TTES1004 | 2412 | 2683 | 2954 | 3225 | 3496 | 3767 | 4038 | 4309 |
| TTES1005 | 2413 | 2684 | 2955 | 3226 | 3497 | 3768 | 4039 | 4310 |
| TTES1006 | 2414 | 2685 | 2956 | 3227 | 3498 | 3769 | 4040 | 4311 |
| TTES1007 | 2415 | 2686 | 2957 | 3228 | 3499 | 3770 | 4041 | 4312 |
| TTES1008 | 2416 | 2687 | 2958 | 3229 | 3500 | 3771 | 4042 | 4313 |
| TTES1009 | 2417 | 2688 | 2959 | 3230 | 3501 | 3772 | 4043 | 4314 |
| TTES1010 | 2418 | 2689 | 2960 | 3231 | 3502 | 3773 | 4044 | 4315 |
| TTES1011 | 2419 | 2690 | 2961 | 3232 | 3503 | 3774 | 4045 | 4316 |
| TTES1012 | 2420 | 2691 | 2962 | 3233 | 3504 | 3775 | 4046 | 4317 |
| TTHY1001 | 2421 | 2692 | 2963 | 3234 | 3505 | 3776 | 4047 | 4318 |
| TTHY1002 | 2422 | 2693 | 2964 | 3235 | 3506 | 3777 | 4048 | 4319 |
| TTHY1003 | 2423 | 2694 | 2965 | 3236 | 3507 | 3778 | 4049 | 4320 |
| TTHY1004 | 2424 | 2695 | 2966 | 3237 | 3508 | 3779 | 4050 | 4321 |
| TUCE1001 | 2425 | 2696 | 2967 | 3238 | 3509 | 3780 | 4051 | 4322 |
| TUCE1002 | 2426 | 2697 | 2968 | 3239 | 3510 | 3781 | 4052 | 4323 |
| TUCE1003 | 2427 | 2698 | 2969 | 3240 | 3511 | 3782 | 4053 | 4324 |
| TUCE1004 | 2428 | 2699 | 2970 | 3241 | 3512 | 3783 | 4054 | 4325 |
| TUCE1005 | 2429 | 2700 | 2971 | 3242 | 3513 | 3784 | 4055 | 4326 |
| TUCE1006 | 2430 | 2701 | 2972 | 3243 | 3514 | 3785 | 4056 | 4327 |
| TUCE1007 | 2431 | 2702 | 2973 | 3244 | 3515 | 3786 | 4057 | 4328 |
| TUCE1008 | 2432 | 2703 | 2974 | 3245 | 3516 | 3787 | 4058 | 4329 |
| TUCE1009 | 2433 | 2704 | 2975 | 3246 | 3517 | 3788 | 4059 | 4330 |
| TUCE1010 | 2434 | 2705 | 2976 | 3247 | 3518 | 3789 | 4060 | 4331 |
| TUCS1001 | 2435 | 2706 | 2977 | 3248 | 3519 | 3790 | 4061 | 4332 |
| TUCS1002 | 2436 | 2707 | 2978 | 3249 | 3520 | 3791 | 4062 | 4333 |
| TUCS1003 | 2437 | 2708 | 2979 | 3250 | 3521 | 3792 | 4063 | 4334 |
| TUVM1001 | 2438 | 2709 | 2980 | 3251 | 3522 | 3793 | 4064 | 4335 |
| TUVM1002 | 2439 | 2710 | 2981 | 3252 | 3523 | 3794 | 4065 | 4336 |

Lists SEQ ID Nos of exemplary nucleic acid sequences of heavy chain, light chain, and complementarity-determining regions of the antibodies disclosed herein or antigen binding fragment thereof. Corresponding nucleic acid sequences are provided in the sequence listing submitted herewith

TABLE 3
lists Exemplary target antigen (cancer associated antigen) identified for the antibodies disclosed
herein. Binding specificity of an antibody to a target antigen is also listed

| | Antigen | | |
|---|---|---|---|
| Antibody | Abbreviated | | |
| Name | Name | Specificity | Antigen Full Name |
| TBLA1001 | RSPO1 | Medium | R-spondin 1, transcript variant 2 |
| TBLA1003 | ZDHHC1 | Medium | zinc finger DHHC-type containing 1, transcript |
| | | | variant 1 |
| TBLA1004 | RXRA | Very High | retinoid X receptor alpha, transcript variant 1 |
| TBLA1004 | RXRG | Very High | retinoid X receptor gamma, transcript variant 1 |
| TBLA1005 | TMEM154 | Medium | transmembrane protein 154 |
| TBLA1006 | SNAPIN | High | SNAP associated protein, transcript variant 1 |
| TBLA1007 | PYGL | Medium | glycogen phosphorylase L, transcript variant 1 |
| TBLA1007 | RCN3 | Medium | Reticulocalbin 3 |
| TBLA1007 | SYT12 | Medium | synaptotagmin 12, transcript variant X4 |
| TBLA1008 | Nr2f6 | Medium | Nuclear receptor subfamily 2 group f member 6 |
| TBLA1008 | PPP1R13L | Medium | protein phosphatase 1 regulatory subunit 13 like, |
| | | | transcript variant 2 |
| TBLA1010 | OR6Q1 | Medium | olfactory receptor family 6 subfamily Q member 1 |
| | | | (gene/pseudogene) |
| TBLA1011 | CTAG1A | Medium | cancer/testis antigen 1A |
| TBLA1012 | CTAG1A | Very High | cancer/testis antigen 1A |
| TBLA1013 | HTR1E | Medium | 5-hydroxytryptamine receptor 1E |
| TBRE1002 | MFAP3 | Medium | microfibril associated protein 3, transcript variant 3 |
| TBRE1004 | HABP4 | Very High | hyaluronan binding protein 4 |
| TBRE1006 | BC025996.2_frag | Medium | glucuronidase, beta pseudogene |
| TBRE1007 | DUSP12 | Medium | dual specificity phosphatase 12 |
| TBRE1007 | ACTN1 | Medium | actinin alpha 1, transcript variant 2 |
| TBRE1009 | ZKSCAN4 | Medium | zinc finger with KRAB and SCAN domains 4, |
| | | | transcript variant X1 |
| TBRE1011 | PNMA5 | High | PNMA family member 5, transcript variant 2 |
| TBRE1012 | KLHL40 | Very High | kelch like family member 40 |
| TBRE1012 | MPP2 | Very High | membrane palmitoylated protein 2, transcript |
| | | | variant 3 |
| TBRE1013 | BTN1A1 | High | butyrophilin subfamily 1 member A1 |
| TBRE1014 | PEX11G | High | peroxisomal biogenesis factor 11 gamma, transcript |
| | | | variant 1 |
| TBRE1017 | ZNF8 | Medium | zinc finger protein 8 |
| TBRE1017 | SATB2 | Medium | SATB homeobox 2, transcript variant 2 |
| TBRE1017 | GDAP1 | Medium | ganglioside induced differentiation associated |
| | | | protein 1, transcript variant 2 |
| TBRE1023 | CTNNAL1 | High | catenin alpha like 1, transcript variant 1 |
| TBRE1024 | FANCG | Medium | FA complementation group G |
| TBRE1027 | DDX18 | Medium | DEAD-box helicase 18 |
| TBRE1027 | STX1A | Medium | syntaxin 1A, transcript variant 1 |
| TBRE1027 | GMNN | Medium | geminin DNA replication inhibitor, transcript |
| | | | variant 1 |
| TBRE1030 | UBQLN1 | Medium | ubiquilin 1, transcript variant 2 |
| TBRE1030 | CNDP2 | Medium | carnosine dipeptidase 2, transcript variant 1 |
| TBRE1032 | XIAP | Medium | X-linked inhibitor of apoptosis, transcript variant 2 |
| TBRE1032 | HABP4 | Medium | hyaluronan binding protein 4 |
| TBRE1034 | SDCCAG3 | Medium | endosome associated trafficking regulator 1, |
| | | | transcript variant 2 |
| TBRE1034 | CHMP4B | Medium | charged multivesicular body protein 4B |
| TBRE1035 | GYG2 | Medium | glycogenin 2, transcript variant 2 |
| TBRE1036 | EGFEM1P | Medium | Egf like and emi domain containing 1, pseudogene |
| TBRE1038 | ACTN4 | Very High | actinin alpha 4, transcript variant 1 |
| TBRE1039 | PNMA5 | Medium | PNMA family member 5, transcript variant 2 |
| TBRE1039 | PLCD1 | Medium | phospholipase C delta 1, transcript variant 2 |
| TBRE1039 | ZNF326 | Medium | zinc finger protein 326, transcript variant 1 |
| TBRE1045 | LN608403.1_frag | Medium | — |
| TBRE1045 | JPX_frag | Medium | JPX transcript, XIST activator |
| TBRE1045 | OBP2A | Medium | odorant binding protein 2A, transcript variant alpha |
| TBRE1049 | MYT1L | High | myelin transcription factor 1 like, transcript variant 2 |
| TBRE1049 | HSPE1 | High | heat shock protein family E (Hsp10) member 1 |
| TBRE1052 | KEAP1 | Very High | kelch like ECH associated protein 1, transcript |
| | | | variant 1 |
| TCER1001 | NAP1L1 | Very High | nucleosome assembly protein 1 like 1, transcript |
| | | | variant 1 |
| TCER1002 | NDE1 | High | nudE neurodevelopment protein 1, transcript |
| | | | variant 1 |
| TCER1003 | TRUB1 | High | TruB pseudouridine synthase family member 1 |
| TCER1003 | IMPDH2 | High | inosine monophosphate dehydrogenase 2 |
| TCER1003 | PLSCR4 | High | phospholipid scramblase 4, transcript variant X4 |
| TCER1004 | IVNS1ABP | Very High | influenza virus NS1A binding protein |
| TCER1005 | DVL3 | Medium | dishevelled segment polarity protein 3 |
| TCER1005 | ZNF260 | Medium | Zinc finger protein 260 |
| TCER1006 | SNX33 | Medium | sorting nexin 33, transcript variant 1 |
| TCER1007 | HN1L | Very High | Jupiter microtubule associated homolog 2 |
| TCER1007 | THEM6 | Very High | thioesterase superfamily member 6, transcript |
| | | | variant 1 |
| TCH01001 | KHDRBS2 | High | KH RNA binding domain containing, signal |
| | | | transduction associated 2, transcript variant 2 |
| TCOL1001 | C1QL3 | Medium | complement C1q like 3 |
| TCOL1002 | PPP1R27 | Medium | protein phosphatase 1 regulatory subunit 27 |
| TCOL1003 | DNASE1L2 | Medium | deoxyribonuclease 1 like 2, transcript variant 1 |
| TCOL1004 | ESYT2_frag | Medium | extended synaptotagmin 2 |
| TCOL1005 | CCL18 | Medium | C-C motif chemokine ligand 18 |
| TCOL1006 | HOMEZ | Medium | homeobox and leucine zipper encoding |
| TCOL1006 | BAIAP2 | Medium | BAR/IMD domain containing adaptor protein 2, |
| | | | transcript variant 3 |
| TCOL1007 | KEAP1 | Very High | kelch like ECH associated protein 1, transcript |
| | | | variant 1 |
| TCOL1008 | RUFY3 | High | RUN and FYVE domain containing 3, transcript |
| | | | variant 2 |
| TCOL1009 | LHX5 | Medium | LIM homeobox 5 |
| TCOL1009 | GRB2 | Medium | growth factor receptor bound protein 2, transcript |
| | | | variant 1 |
| TESO1001 | TH | High | Tyrosine hydroxylase |
| TESO1003 | LRRC28 | Medium | leucine rich repeat containing 28, transcript variant 1 |
| TESO1005 | SPATA33 | Medium | spermatogenesis associated 33, transcript variant 2 |
| TESO1006 | ATP2C1 | Medium | Atpase secretory pathway ca2+ transporting 1 |
| TESO1006 | TSHZ2 | Medium | teashirt zinc finger homeobox 2, transcript variant 1 |
| THNS1002 | C4BPB | Medium | Complement component 4 binding protein beta |
| THNS1003 | NCCRP1 | Very High | NCCRP1, F-box associated domain containing |
| THNS1003 | CCDC102A | Very High | coiled-coil domain containing 102A, transcript |
| | | | variant X1 |
| THNS1004 | RBM47 | High | RNA binding motif protein 47, transcript variant |
| | | | X10 |
| THNS1006 | RAD1 | Medium | RAD1 checkpoint DNA exonuclease, transcript |
| | | | variant 1 |
| THNS1006 | MTUS1 | Medium | Microtubule associated scaffold protein 1 |
| THINS1008 | KEAP1 | Very High | kelch like ECH associated protein 1, transcript |
| | | | variant 1 |
| THNS1009 | PNMA5 | Very High | PNMA family member 5, transcript variant 2 |
| THNS1013 | GPR83 | Medium | G protein-coupled receptor 83, transcript variant 1 |
| THNS1014 | CDS1 | Medium | CDP-diacylglycerol synthase 1 |
| THNS1014 | DNAAF3 | Medium | dynein axonemal assembly factor 3, transcript |
| | | | variant 3 |
| TKIC1001 | CPNE1 | Medium | copine 1, transcript variant 2 |
| TKIC1002 | ADCK5 | Medium | aarF domain containing kinase 5 |
| TKIC1004 | CRYAB | Medium | crystallin alpha B, transcript variant 2 |
| TKIC1005 | HCLS1 | Very High | hematopoietic cell-specific Lyn substrate 1, |
| | | | transcript variant 1 |
| TKIC1006 | AKR1B1 | Very High | aldo-keto reductase family 1 member B, transcript |
| | | | variant 1 |
| TKIC1007 | SURF6 | Medium | surfeit 6, transcript variant 1 |
| TKIC1007 | PCNA | Medium | proliferating cell nuclear antigen, transcript variant 1 |
| TKIC1012 | S100B | High | S100 calcium binding protein B |
| TKIC1013 | CHEK2 | Medium | checkpoint kinase 2, transcript variant 3 |
| TKIC1019 | ANKRD53 | Medium | ankyrin repeat domain 53, transcript variant 2 |
| TLUA1001 | KLRG2 | Medium | Killer cell lectin like receptor g2 |
| TLUA1001 | TRIM35 | Medium | tripartite motif containing 35, transcript variant 1 |
| TLUA1001 | FXR2 | Medium | FMR1 autosomal homolog 2 |
| TLUA1004 | ANXA1 | Very High | annexin Al |
| TLUA1008 | ZNF287 | Medium | zinc finger protein 287, transcript variant 2 |
| TLUA1016 | FAM177A1 | Medium | family with sequence similarity 177 member A1, |
| | | | transcript variant 2 |
| TLUS1001 | QDPR | Medium | quinoid dihydropteridine reductase, transcript |
| | | | variant 1 |
| TLUS1003 | BC031259.1_frag | Medium | ELK2, member of ETS oncogene family, |
| | | | pseudogene 1 |
| TLUS1003 | METTL21C | Medium | methyltransferase like 21C |
| TLUS1006 | HMBS | High | hydroxymethylbilane synthase, transcript variant |
| | | | X3 |
| TLUS1006 | HOOK2 | High | hook microtubule tethering protein 2, transcript |
| | | | variant 2 |
| TMEL1016 | Q6ir13_frag | Very High | Magel2 |
| TMEL1016 | SRSF3 | Very High | serine and arginine rich splicing factor 3, transcript |
| | | | variant 1 |
| TMEL1017 | RANBP10 | Medium | RAN binding protein 10, transcript variant 1 |
| TMEL1017 | WNT9B | Medium | Wnt family member 9b |
| TMEL1018 | UBQLN2 | Very High | ubiquilin 2 |
| TMEL1018 | UBQLN1 | Very High | ubiquilin 1, transcript variant 2 |
| TMEL1018 | UBQLN3 | Very High | Ubiquilin 3 |
| TMEL1020 | AGR3 | Very High | anterior gradient 3, protein disulphide isomerase |
| | | | family member |
| TMEL1022 | SRSF3 | Medium | serine and arginine rich splicing factor 3, transcript |
| | | | variant 1 |
| TMEL1023 | BIRC7 | Very High | baculoviral IAP repeat containing 7, transcript |
| | | | variant 1 |
| TMEL1025 | SDCCAG3 | High | endosome associated trafficking regulator 1, |
| | | | transcript variant 2 |
| TMEL1027 | MTUS2 | High | microtubule associated scaffold protein 2, |
| | | | transcript variant 2 |
| TMEL1028 | ZNF296 | Medium | zinc finger protein 296 |
| TMEL1028 | PDE5A | Medium | phosphodiesterase 5A, transcript variant 1 |
| TMEL1028 | EP400NL | Medium | Ep400 pseudogene 1 |
| TMEL1030 | BCL2L1 | Medium | Bcl2 like 1 |
| TMEL1031 | ARGLU1 | Medium | arginine and glutamate rich 1 |
| TMEL1031 | SASS6 | Medium | SAS-6 centriolar assembly protein, transcript |
| | | | variant 2 |
| TMEL1032 | PSMD4 | Medium | proteasome 26S subunit, non-ATPase 4, transcript |
| | | | variant 2 |
| TMEL1032 | SLA | Medium | Src like adaptor, transcript variant 1 |
| TMEL1033 | NUDT21 | Medium | nudix hydrolase 21 |
| TMEL1033 | ZNF431 | Medium | zinc finger protein 431, transcript variant 2 |
| TMEL1033 | ZNF699 | Medium | Zinc finger protein 699 |
| TMEL1034 | QDPR | Medium | quinoid dihydropteridine reductase, transcript |
| | | | variant 1 |
| TMEL1035 | PAGE2 | Medium | PAGE family member 2 |
| TMEL1035 | KRTAP12-3 | Medium | keratin associated protein 12-3 |
| TMEL1037 | ENO2 | Medium | enolase 2 |
| TMEL1037 | C11orf68 | Medium | chromosome 11 open reading frame 68, transcript |
| | | | variant 1 |
| TMEL1038 | MARS | Medium | methionyl-tRNA synthetase 1 |
| TMEL1040 | SERPINB6 | High | serpin family B member 6, transcript variant 2 |
| TMEL1041 | ERP27 | Very High | endoplasmic reticulum protein 27, transcript |
| | | | variant 1 |
| TMEL1041 | DPY30 | Very High | Dpy-30 histone methyltransferase complex |
| | | | regulatory subunit |
| TMEL1041 | ROPN1L | Very High | rhophilin associated tail protein 1 like, transcript |
| | | | variant 2 |
| TMES1001 | SDCCAG3 | Medium | endosome associated trafficking regulator 1, |
| | | | transcript variant 2 |
| TMES1002 | HN1L | High | Jupiter microtubule associated homolog 2 |
| TMES1002 | BTBD8 | High | BTB domain containing 8 |
| TMES1003 | NCF4 | Medium | neutrophil cytosolic factor 4, transcript variant 2 |
| TMES1003 | TCP11L2 | Medium | t-complex 11 like 2, transcript variant X2 |
| TMES1003 | PLCB2 | Medium | phospholipase C beta 2, transcript variant 4 |
| TMES1004 | MAPRE2 | High | microtubule associated protein RP/EB family |
| | | | member 2, transcript variant 1 |
| TOVA1001 | DDX53 | Very High | DEAD-box helicase 53 |
| TOVA1002 | IL27RA | Medium | interleukin 27 receptor subunit alpha |
| TOVA1003 | DHPS | High | Deoxyhypusine synthase |
| TOVA1004 | HEATR3 | High | HEAT repeat containing 3, transcript variant 1 |
| TOVA1005 | DDX53 | High | DEAD-box helicase 53 |
| TOVA1005 | VEZT | High | Vezatin, adherens junctions transmembrane protein |
| TOVA1005 | WDR3 | High | Wd repeat domain 3 |
| TOVA1006 | DDX58 | Very High | DExD/H-box helicase 58 |
| TOVA1006 | DDX58 | Very High | DExD/H-box helicase 58 |
| TOVA1007 | NUDT22 | High | nudix hydrolase 22, transcript variant 2 |
| TOVA1008 | HN1L | Very High | Jupiter microtubule associated homolog 2 |
| TPAN1001 | GCA | Medium | grancalcin, transcript variant 4 |
| TPAN1002 | ERP27 | High | endoplasmic reticulum protein 27, transcript |
| | | | variant 1 |
| TPAN1003 | POLR3G | Medium | Rna polymerase iii subunit g |
| TPAN1004 | SNX1 | Medium | sorting nexin 1, transcript variant 1 |
| TPAN1005 | AB937783.1_frag | Medium | SAA2-SAA3 |
| TPAN1005 | PSMD3 | Medium | proteasome 26S subunit, non-ATPase 3 |
| TPAN1006 | CRKL | Medium | CRK like proto-oncogene, adaptor protein, |
| | | | transcript variant 1 |
| TPAN1007 | FBXO2 | Medium | F-box protein 2 |
| TPAN1007 | TUBG1 | Medium | tubulin gamma 1 |
| TPRO1001 | OXR1 | High | oxidation resistance 1, transcript variant 1 |
| TPRO1002 | ANKRD20A5P | Medium | Ankyrin repeat domain 20 family member a5, |
| | | | pseudogene |
| TPRO1002 | KIRREL | Medium | Kirre like nephrin family adhesion molecule 1 |
| TPRO1002 | GIGYF1 | Medium | GRB10 interacting GYF protein 1, transcript |
| | | | variant X10 |
| TPRO1003 | DEFA3 | Medium | defensin alpha 3 |
| TREC1001 | RSPH14 | Medium | radial spoke head 14 homolog |
| TREC1002 | CCL2 | Medium | C-C motif chemokine ligand 2 |
| TREC1003 | KLRC1 | Medium | killer cell lectin like receptor C1, transcript variant 3 |
| TREC1003 | KLHL12 | Medium | kelch like family member 12, transcript variant 2 |
| TSAR1001 | NRL | Medium | neural retina leucine zipper, transcript variant X4 |
| TSAR1002 | PLCD4 | Medium | phospholipase C delta 4 |
| TSAR1003 | CCDC74B | Medium | coiled-coil domain containing 74B, transcript |
| | | | variant 2 |
| TSAR1004 | DDX53 | High | DEAD-box helicase 53 |
| TSAR1005 | HSPBP1 | Very High | HSPA (Hsp70) binding protein 1, transcript variant 2 |
| TSAR1005 | HSPA2 | Very High | heat shock protein family A (Hsp70) member 2 |
| TSAR1005 | BAG2 | Very High | BCL2 associated athanogene 2 |
| TSAR1006 | CXCR4 | Medium | C-X-C motif chemokine receptor 4, transcript |
| | | | variant 2 |
| TSAR1006 | LINC00242 | Medium | Long intergenic non-protein coding rna 242 |
| TSAR1007 | STAT5A | Medium | signal transducer and activator of transcription 5A, |
| | | | transcript variant 2 |
| TSAR1007 | QDPR | Medium | quinoid dihydropteridine reductase, transcript |
| | | | variant 1 |
| TSTO1001 | CIB1 | Medium | calcium and integrin binding 1, transcript variant b |
| TSTO1001 | TSNARE1 | Medium | t-SNARE domain containing 1, transcript variant 1 |
| TSTO1002 | HAUS1 | Very High | HAUS augmin like complex subunit 1, transcript |
| | | | variant 1 |
| TSTO1002 | DYDC1 | Very High | DPY30 domain containing 1, transcript variant X4 |
| TSTO1003 | TGFB3 | Medium | Transforming growth factor beta 3 |
| TSTO1004 | CTRB2 | Medium | chymotrypsinogen B2 |
| TSTO1005 | NFKBIB | Very High | NFKB inhibitor beta, transcript variant 1 |
| TSTO1005 | CDK2AP2 | Very High | cyclin dependent kinase 2 associated protein 2, |
| | | | transcript variant 1 |
| TSTO1006 | LIPN | Medium | lipase family member N, transcript variant X1 |
| TSTO1007 | RGS14 | High | regulator of G protein signaling 14, transcript |
| | | | variant 1 |
| TSTO1007 | LRRC14 | High | leucine rich repeat containing 14, transcript variant 1 |
| TSTO1008 | TGFBI | Medium | transforming growth factor beta induced |
| TSTO1010 | BCL2 | High | BCL2 apoptosis regulator, transcript variant alpha |
| TTES1001 | DIXDC1 | Medium | DIX domain containing 1, transcript variant 2 |
| TTES1002 | CASP8 | Medium | Caspase 8 |
| TTES1002 | PGM2L1 | Medium | phosphoglucomutase 2 like 1 |
| TTES1003 | PDCD1 | Very High | programmed cell death 1 |
| TTES1004 | GRHPR | High | glyoxylate and hydroxypyruvate reductase |
| TTES1005 | CYB5R2 | Medium | Cytochrome b5 reductase 2 |
| TTES1006 | ACBD6 | Very High | acyl-CoA binding domain containing 6 |
| TTES1007 | PDCL | Medium | phosducin like |
| TTES1008 | DDX52 | Medium | Dexd-box helicase 52 |
| TTES1008 | GPR4 | Medium | G protein-coupled receptor 4 |
| TTES1009 | ADCK5 | Medium | aarF domain containing kinase 5 |
| TTES1010 | DIXDC1 | Medium | DIX domain containing 1, transcript variant 2 |
| TTES1011 | HN1L | High | Jupiter microtubule associated homolog 2 |
| TTES1012 | GAGE2A | Medium | G antigen 2A |
| TTHY1001 | DIXDC1 | Medium | DIX domain containing 1, transcript variant 2 |
| TTHY1001 | POLR2E | Medium | RNA polymerase II subunit E, transcript variant 1 |
| TTHY1002 | PCNA | Medium | proliferating cell nuclear antigen, transcript variant 1 |
| TTHY1003 | BCL7C | Medium | BAF chromatin remodeling complex subunit |
| | | | BCL7C, transcript variant 2 |
| TTHY1003 | IVNS1ABP | Medium | influenza virus NS1A binding protein |
| TTHY1004 | CTAG1A | Medium | cancer/testis antigen 1A |
| TUCE1004 | CTAG1A | Very High | cancer/testis antigen 1A |
| TUCE1005 | UTP6 | Medium | UTP6 small subunit processome component |
| TUCS1003 | CTAG1A | Very High | cancer/testis antigen 1A |
| TUVM1001 | RP2 | Medium | RP2 activator of ARL3 GTPase |

| | SEQ | |
|---|---|---|
| | ID | NCBI |
| Antigen Name | NO: | Accession NO: |
| RSPO1 | 4337 | NP_001229837 |
| ZDHHC1 | 4338 | NP_037436 |
| RXRA | 4339 | NP_002948 |
| RXRG | 4340 | NP_008848 |
| TMEM154 | 4341 | NP_689893 |
| SNAPIN | 4342 | NP_036569 |
| PYGL | 4343 | NP_002854 |
| RCN3 | 4344 | NP_065701 |
| SYT12 | 4345 | XP_011543649 |
| Nr2f6 | 4346 | NP_005225 |
| PPP1R13L | 4347 | NP_006654 |
| OR6Q1 | 4348 | NP_001005186 |
| CTAG1A | 4349 | NP_640343 |
| HTR1E | 4350 | NP_000856 |
| MFAP3 | 4351 | NP_001229265 |
| HABP4 | 4352 | NP_055097 |
| BC025996.2_frag | 4353 | NR_003675 |
| DUSP12 | 4354 | NP_009171 |
| ACTN1 | 4355 | NP_001093 |
| ZKSCAN4 | 4356 | XP_005249152 |
| PNMA5 | 4357 | NP_001096620 |
| KLHL40 | 4358 | NP_689606 |
| MPP2 | 4359 | NP_005365 |
| BTN1A1 | 4360 | NP_001723 |
| PEX11G | 4361 | NP_542393 |
| ZNF8 | 4362 | NP_066575 |
| SATB2 | 4363 | NP_056080 |
| GDAP1 | 4364 | NP_001035808 |
| CTNNAL1 | 4365 | NP_003789 |
| FANCG | 4366 | NP_004620 |
| DDX18 | 4367 | NP_006764 |
| STX1A | 4368 | NP_004594 |
| GMNN | 4369 | NP_056979 |
| UBQLN1 | 4370 | NP_444295 |
| CNDP2 | 4371 | NP_060705 |
| XIAP | 4372 | NP_001191330 |
| SDCCAG3 | 4373 | NP_006634 |
| CHMP4B | 4374 | NP_789782 |
| GYG2 | 4375 | NP_003909 |
| EGFEM1P | 4376 | NR_021485 |
| ACTN4 | 4377 | NP_004915 |
| PLCD1 | 4378 | NP_006216 |
| ZNF326 | 4379 | NP_892021 |
| LN608403.1_frag | 4380 | — |
| JPX_frag | 4381 | — |
| OBP2A | 4382 | NP_055397 |
| MYT1L | 4383 | NP_055840 |
| HSPE1 | 4384 | NP_002148 |
| KEAP1 | 4385 | NP_987096 |
| NAP1L1 | 4386 | NP_631946 |
| NDE1 | 4387 | NP_001137451 |
| TRUB1 | 4388 | NP_631908 |
| IMPDH2 | 4389 | NP_000875 |
| PLSCR4 | 4390 | XP_011511333 |
| IVNS1ABP | 4391 | NP_006460 |
| DVL3 | 4392 | NP_004414 |
| ZNF260 | 4393 | NP_001012774 |
| SNX33 | 4394 | NP_695003 |
| HN1L | 4395 | NP_653171 |
| THEM6 | 4396 | NP_057731 |
| KHDRBS2 | 4397 | NP_689901 |
| C1QL3 | 4398 | NP_001010908 |
| PPP1R27 | 4399 | NP_001007534 |
| DNASE1L2 | 4400 | NP_001365 |
| ESYT2_frag | 4401 | NP_001354702 |
| CCL18 | 4402 | NP_002979 |
| HOMEZ | 4403 | NP_065885 |
| BAIAP2 | 4404 | NP_006331 |
| RUFY3 | 4405 | NP_055776 |
| LHX5 | 4406 | NP_071758 |
| GRB2 | 4407 | NP_002077 |
| TH | 4408 | NP_000351 |
| LRRC28 | 4409 | NP_653199 |
| SPATA33 | 4410 | NP_694570 |
| ATP2C1 | 4411 | NP_001001485 |
| TSHZ2 | 4412 | NP_775756 |
| C4BPB | 4413 | NP_000707 |
| NCCRP1 | 4414 | NP_001001414 |
| CCDC102A | 4415 | XP_011521771 |
| RBM47 | 4416 | XP_005248166 |
| RAD1 | 4417 | NP_002844 |
| MTUS1 | 4418 | NP_001001924 |
| GPR83 | 4419 | NP_057624 |
| CDS1 | 4420 | NP_001254 |
| DNAAF3 | 4421 | NP_001243644 |
| CPNE1 | 4422 | NP_690903 |
| ADCK5 | 4423 | NP_777582 |
| CRYAB | 4424 | NP_001276736 |
| HCLS1 | 4425 | NP_005326 |
| AKR1B1 | 4426 | NP_001619 |
| SURF6 | 4427 | NP_006744 |
| PCNA | 4428 | NP_002583 |
| S100B | 4429 | NP_006263 |
| CHEK2 | 4430 | NP_001005735 |
| ANKRD53 | 4431 | NP_079209 |
| KLRG2 | 4432 | NP_940910 |
| TRIM35 | 4433 | NP_741983 |
| FXR2 | 4434 | NP_004851 |
| ANXA1 | 4435 | NP_000691 |
| ZNF287 | 4436 | NP_065704 |
| FAM177A1 | 4437 | NP_001072987 |
| QDPR | 4438 | NP_000311 |
| BC031259.1_frag | 4439 | — |
| METTL21C | 4440 | NP_001010977 |
| HMBS | 4441 | XP_005271589 |
| HOOK2 | 4442 | NP_001093646 |
| Q6ir13_frag | 4443 | — |
| SRSF3 | 4444 | NP_003008 |
| RANBP10 | 4445 | NP_065901 |
| WNT9B | 4446 | NM_001320458 |
| UBQLN2 | 4447 | NP_038472 |
| UBQLN3 | 4448 | NP_001334025 |
| AGR3 | 4449 | NP_789783 |
| BIRC7 | 4450 | NP_647478 |
| MTUS2 | 4451 | NP_056048 |
| ZNF296 | 4452 | NP_660331 |
| PDE5A | 4453 | NP_001074 |
| EP400NL | 4454 | NR_003290 |
| BCL2L1 | 4455 | NP_001182 |
| ARGLU1 | 4456 | NP_060481 |
| SASS6 | 4457 | NP_001291758 |
| PSMD4 | 4458 | NP_002801 |
| SLA | 4459 | NP_001039021 |
| NUDT21 | 4460 | NP_008937 |
| ZNF431 | 4461 | NP_597730 |
| ZNF699 | 4462 | NP_940937 |
| PAGE2 | 4463 | NP_997222 |
| KRTAP12-3 | 4464 | NP_941970 |
| ENO2 | 4465 | NP_001966 |
| C11orf68 | 4466 | NP_001129107 |
| MARS | 4467 | NP_004981 |
| SERPINB6 | 4468 | NP_001182220 |
| ERP27 | 4469 | NP_689534 |
| DPY30 | 4470 | NP_001308138 |
| ROPN1L | 4471 | NP_001188395 |
| BTBD8 | 4472 | NP_899065 |
| NCF4 | 4473 | NP_038202 |
| TCP11L2 | 4474 | XP_005268824 |
| PLCB2 | 4475 | NP_001271228 |
| MAPRE2 | 4476 | NP_055083 |
| DDX53 | 4477 | NP_874358 |
| IL27RA | 4478 | NP_004834 |
| DHPS | 4479 | NP_001193903 |
| HEATR3 | 4480 | NP_891552 |
| VEZT | 4481 | NP_001339017 |
| WDR3 | 4482 | NP_006775 |
| DDX58 | 4483 | NP_055129 |
| NUDT22 | 4484 | NP_001122084 |
| GCA | 4485 | NP_036330 |
| POLR3G | 4486 | NP_001357280 |
| SNX1 | 4487 | NP_003090 |
| AB937783.1_frag | 4488 | NP_001120852 |
| PSMD3 | 4489 | NP_002800 |
| CRKL | 4490 | NP_005198 |
| FBXO2 | 4491 | NP_036300 |
| TUBG1 | 4492 | NP_001061 |
| OXR1 | 4493 | NP_060472 |
| ANKRD20A5P | 4494 | NR_040113 |
| KIRREL | 4495 | NP_001164456 |
| GIGYF1 | 4496 | XP_005250589 |
| DEFA3 | 4497 | NP_005208 |
| RSPH14 | 4498 | NP_055248 |
| CCL2 | 4499 | NP_002973 |
| KLRC1 | 4500 | NP_998823 |
| KLHL12 | 4501 | NP_067646 |
| NRL | 4502 | XP_011535104 |
| PLCD4 | 4503 | NP_116115 |
| CCDC74B | 4504 | NP_001245236 |
| HSPBP1 | 4505 | NP_001123578 |
| HSPA2 | 4506 | NP_068814 |
| BAG2 | 4507 | NP_004273 |
| CXCR4 | 4508 | NP_003458 |
| LINC00242 | 4509 | NR_026781 |
| STAT5A | 4510 | NP_003143 |
| CIB1 | 4511 | NP_006375 |
| TSNARE1 | 4512 | NP_659440 |
| HAUS1 | 4513 | NP_612452 |
| DYDC1 | 4514 | XP_011537637 |
| TGFB3 | 4515 | NP_003230. |
| CTRB2 | 4516 | NP_001020371 |
| NFKBIB | 4517 | NP_002494 |
| CDK2AP2 | 4518 | NP_005842 |
| LIPN | 4519 | XP_011538385 |
| RGS14 | 4520 | NP_006471 |
| LRRC14 | 4521 | NP_001258965 |
| TGFBI | 4522 | NP_000349 |
| BCL2 | 4523 | NP_000624 |
| DIXDC1 | 4524 | NP_219493 |
| CASP8 | 4525 | NP_001073593 |
| PGM2L1 | 4526 | NP_775853 |
| PDCD1 | 4527 | NP_005009 |
| GRHPR | 4528 | NP_036335 |
| CYB5R2 | 4529 | NP_057313 |
| ACBD6 | 4530 | NP_115736 |
| PDCL | 4531 | NP_005379 |
| DDX52 | 4532 | NP_001278405 |
| GPR4 | 4533 | NP_005273 |
| GAGE2A | 4534 | NP_001120684 |
| POLR2E | 4535 | NP_002686 |
| BCL7C | 4536 | NP_004756 |
| UTP6 | 4537 | NP_060898 |
| RP2 | 4538 | NP_008846 |

1. (canceled)

2. (canceled)

3. An antibody or antigen-binding fragment thereof that comprises:
(a) a variable heavy chain complementarity-determining region 1 (CDR-H1), a CDR-H2 and a CDR-H3, wherein:
(i) the CDR-H1 comprises a reconstructed polypeptide consensus sequence selected from any one of SEQ ID NOs: 543-813,
(ii) the CDR-H2 comprises a reconstructed polypeptide consensus sequence selected from any one of SEQ ID NOs: 1085-1355, and
(iii) the CDR-H3 comprises a reconstructed polypeptide consensus sequence selected from any one of SEQ ID NOs: 1627-1897; and
(b) a variable light chain complementarity-determining region 1 (CDR-L1), a CDR-L2, and a CDR-L3, wherein:
(i) the CDR-L1 comprises a reconstructed polypeptide consensus sequence selected from any one of SEQ ID NOs: 814-1084,
(ii) the CDR-L2 comprises a reconstructed polypeptide consensus sequence selected from any one of SEQ ID NOs: 1356-1626, and
the CDR-L3 comprises a reconstructed polypeptide consensus sequence selected from any one of SEQ ID NOs: 1898-2168.

4. (canceled)

5. (canceled)

6. The antibody or antigen-binding fragment thereof of claim 3, wherein the antibody comprises a chimeric antibody, a humanized antibody, a human antibody, a monoclonal antibody, a deimmunized antibody, a bispecific antibody, a multispecific antibody, a multivalent antibody, or a combination thereof.

7. The antibody or antigen-binding fragment thereof of claim 3, wherein the antigen-binding fragment comprises a Fab, Fab′, Fab′-SH, Fv, scFv, F(ab′)2, a diabody, a linear antibody, a single domain antibodies (sdAb), a camelid V_{HH} domain, or a multi-specific antibody formed from antibody fragments.

8. (canceled)

9. (canceled)

10. The antibody or antigen-binding fragment thereof of claim 3, wherein the antibody or antigen-binding fragment thereof is cytolytic to a tumor cell or a cancer cell.

11. The antibody or antigen-binding fragment thereof of claim 3, wherein the antibody or antigen-binding fragment thereof inhibits tumor growth or cancer cell growth.

12.-34. (canceled)

35. An antibody or antigen-binding fragment thereof comprising:
a variable heavy chain, wherein the variable heavy chain comprises a reconstructed polypeptide consensus sequence having at least 95% sequence identity to an amino acid sequence selected from any one of SEQ ID NOs: 1-271; and/or
a variable light chain, wherein the variable light chain comprises a reconstructed polypeptide consensus sequence having at least 95% sequence identity to an amino acid sequence selected from any one of SEQ ID NOs: 272-542.

36. (canceled)

37. A fusion protein that comprises the antibody or antigen-binding fragment thereof of claim 3.

38.-51. (canceled)

52. An immunoconjugate comprising the antibody or the antigen binding fragment thereof of claim 3, and a therapeutic agent.

53. A pharmaceutical composition or a medicament that comprises the antibody or antigen-binding fragment thereof of claim 3 and a pharmaceutically acceptable carrier, excipient or diluent.

54-62. (canceled)

63. A method for treating a subject suffering from a cancer, the method comprising administering to the subject a therapeutically effective amount of the antibody or antigen-binding fragment thereof of claim 3.

64. (canceled)

65. (canceled)

66. The method of claim 63, wherein the cancer is a bladder cancer, and wherein the bladder cancer is bladder urothelial carcinoma, squamous cell carcinoma of the bladder, adenocarcinoma of the bladder, or small cell carcinoma of the bladder.

67-88. (canceled)

89. The method of claim 63, wherein the antibody or antigen-binding fragment thereof is administered subcutaneously, intravenously, intradermally, intraperitoneally, orally, intramuscularly or intracranially.

90. The method of claim 63, wherein the antibody or antigen-binding fragment thereof is administered to the subject in combination with a second therapeutic agent.

91.-93. (canceled)

94. An isolated nucleic acid molecule encoding at least one polypeptide sequence according to claim 3.

95. An isolated nucleic acid molecule comprising a nucleic acid sequence encoding a heavy chain polypeptide of an antibody, wherein the nucleic acid sequence is selected from any one of SEQ ID NOs: 2169-2439.

96. An isolated nucleic acid molecule comprising a nucleic acid sequence encoding a light chain polypeptide of an antibody, wherein the nucleic acid sequence is selected from any one of SEQ ID NOs: 2440-2710.

97. A vector comprising the isolated nucleic acid molecule of claim 94.

98. (canceled)

99. A host cell comprising the vector of claim 97.

100. A method of producing an antibody or an antigen binding fragment thereof, the method comprising:
(a) culturing the host cell of claim 99 in a medium under conditions permitting expression of a polypeptide encoded by the isolated nucleic acid molecule and assembling of the antibody or an antigen binding fragment thereof; and
(b) purifying the antibody or antigen binding fragment thereof from the cultured cell or the medium of the cell.

101.-106. (canceled)

The application's sequence listing, which the Patent Office published only in electronic form, follows.

SEQUENCE LISTING (6439 sequences)

SEQ ID NO: 1 - protein, 220 aa, synthetic construct
  REGION 1..220: note = Synthetic polypeptide representing artificial human antibody VH chain
CEMQLLQSGGGLVQPGGSLRLSCVASEVTFNTYGMSWVRQAPGKGLEWVSYMSGGGGSIFYADSVKGRFTISRDNSKNTLYLQMNSLRGEDTAVYFCARVTLGSYFYGMDVWGQGTTVTVSSASTKGPSVFPLAPSSKSTSGGTAALGCLVKDYFPEPVTVSWNSGALTSGVHTFPAVLQSSGLYSLSSVVTVPSSSLGTQTYICNVNHKPSNTKVDKKV

SEQ ID NO: 2 - protein, 220 aa, synthetic construct
  REGION 1..220: note = Synthetic polypeptide representing artificial human antibody VH chain
VVQLVESGGGLVQPGGSLRLSCAASGFTFSSYWMSWVRQAPGKGLEWVANIKQDGSEKYYVDSVKGRFTISRDNAKKSLYLQMNSLRAEDTAVYYCARDGGSGSYFDCFDYWGQGTLVTVSSASTKGPSVFPLAPSSKSTSGGTAALGCLVKDYFPEPVTVSWNSGALTSGVHTFPAVLQSSGLYSLSSVVTVPSSSLGTQTYICNVNHKPSNTKVDKSE

SEQ ID NO: 3 - protein, 223 aa, synthetic construct
  REGION 1..223: note = Synthetic polypeptide representing artificial human antibody VH chain
EVQLVESGGGLIQPGRSLRLSCAASGFTFEDYAMHWVRQAPGKGLEWVSGISWNSGNIGYADSVKGRFTISRDNAKNSLYLQMHSLRPEDTALYYCAKDINFFGLGTGGGAMDVWGQGTTVTVSSASTKGPSVFPLAPSSKSTSGGTAALGCLVKDYFPEPVTVSWNSGALTSGVHTFPAVLQSSGLYSLSSVVTVPSSSLGTQTYICNVNHKPSNTKVDKRE

SEQ ID NO: 4 - protein, 119 aa, synthetic construct
  REGION 1..119: note = Synthetic polypeptide representing artificial human antibody VH chain
QITLKESGPTLVKPTQTLTLTCTFSGFSLSTSGVGVGWIRQPPGKALEWLALIYWDDDKRYSPSLKSRLTITKDTSKNQVVLTMTNMDPVDTATYYCAHRAIVGLFDYWGQGTLVTVSS

SEQ ID NO: 5 - protein, 223 aa, synthetic construct
  REGION 1..223: note = Synthetic polypeptide representing artificial human antibody VH chain
QVQLVQSGAEVKKPGASVKISCKTSGYTFTTYYMHWVRQAPGQGLEWMGIINTSGGSTSYAQKFQGRVTMTRDTSTNTVYMELSSLRYEDTAMYYCARGGDGGPQDAFDIWGQGTKVTVSSASPTSPKVFPLSLCSTQPDGNVVIACLVQGFFPQEPLSVTWSESGQGVTARNFPPSQDASGDLYTTSSQLTLPATQCLAGKSVTCHVKHYTNPSQDVTVPCP

SEQ ID NO: 6 - protein, 221 aa, synthetic construct
  REGION 1..221: note = Synthetic polypeptide representing artificial human antibody VH chain
VQLVDSGGGLVQPGRSLRLSCAASGFVFDDYAMHWVRQVPGKGLEWVSGISWNSVSIGYADSVKGRFTISRDNAKNSLYLQMNSLRPEDAALYYCVKSFSAEYYYYYYGMDVWGQGTTVTVSSASTKGPSVFPLAPSSKSTSGGTAALGCLVKDYFPEPVTVSWNSGALTSGVHTFPAVLQSSGLYSLSSVVTVPSSSLGTQTYICNVNHKPSNTKVDKSE

SEQ ID NO: 7 - protein, 122 aa, synthetic construct
  REGION 1..122: note = Synthetic polypeptide representing artificial human antibody VH chain
QVQLVQSGAEVKKPGASVKVSCKASGYTFTNYGFSWVRQAPGQGLEWMGRITTYNRDTIYAQKFQGRVTMTTDTSTSTAYMELRSLRSDDTAVYFCARVVPGDSVYGAFDIWGQGTMVTVSS

SEQ ID NO: 8 - protein, 222 aa, synthetic construct
  REGION 1..222: note = Synthetic polypeptide representing artificial human antibody VH chain
EVQLVESGGGVVQPGGSLRLSCTASGFTFDDYAMHWVRQAPGKGLEWVSLISGDGGGTYYADSVKGRFTISRDNSKNSLYLQMNSLRTEDTALYYCAKRTPFGEWAFDYWGQGTLVTVSSASPTSPKVFPLSLCSTQPDGNVVIACLVQGFFPQEPLSVTWSESGQGVTARNFPPSQDASGDLYTTSSQLTLPATQCLAGKSVTCHVKHYTNPSQDVTVPCP

SEQ ID NO: 9 - protein, 124 aa, synthetic construct
  REGION 1..124: note = Synthetic polypeptide representing artificial human antibody VH chain
EVQLVESGGGVVQPGGSLRLSCAASGFTFSYYGMYWVRQAPGKGLEWVTFIRYDGRNKYYADSVKGRFTISRDNSKNTLYLEMNTLRTEDTAMYFCAKDPGTFRDHLWSGVDYWGQGTLVTVSS

SEQ ID NO: 10 - protein, 221 aa, synthetic construct
  REGION 1..221: note = Synthetic polypeptide representing artificial human antibody VH chain
EVQLVESGGGLVQPGRSLRLSCAASGFPFGDYAMHWVRQAPGKGLEWVSGIGWDSGGIGYADSVKGRFTISRDIAKNSLYLEINSLRPDDTALYYCAKAAATLPYFRFAMDVWGQGTPVTVSSASTKGPSVFPLAPSSKSTSGGTAALGCLVKDYFPEPVTVSWNSGALTSGVHTFPAVLQSSGLYSLSSVVTVPSSSLGTQTYICNVNHKPSNTKVDKNV

SEQ ID NO: 11 - protein, 222 aa, synthetic construct
  REGION 1..222: note = Synthetic polypeptide representing artificial human antibody VH chain
PGLLVQSGGEVKKPGASVRVSCKASGYIDINNGISWVRQAPGHGLEWMGWISIYSGNTKYAQKFQGRVTMTTATSTSTVYMELRSLTSDDTAVYYCARVGVFKGLAPFGGFDPWGQGTLVTVSSASTKGPSVFPLAPCSRSTSESTAALGCLVKDYFPEPVTVSWNSGALTSGVHTFPAVLQSSGLYSLSSVVTVPSSSLGTKTYTCNVDHKPSNTKVDKRV

SEQ ID NO: 12 - protein, 118 aa, synthetic construct
  REGION 1..118: note = Synthetic polypeptide representing artificial human antibody VH chain
LLQLVESGGGVVQPGRSLRLSCAASGFTFTRHGFHWVRQAPGKGLEWVAVISSDGRKIHYTDSVKGRFVISRDDSDNTVYLHMNSLRLGDTALYYCARDSGGTPGPYWGQGTLVTVSS

SEQ ID NO: 13 - protein, 222 aa, synthetic construct
  REGION 1..222: note = Synthetic polypeptide representing artificial human antibody VH chain
CEVQLLESGGGLVQPGGSLTLSCVGSRFTFSSYAMNWVRQSPGRGLEWVASISATTGSTYYTDSVEGRFTISRDNSRDTLYLQMNSLRADDTALYYCVRSFVGAVPAYPNFDFWGPGTLVTVSSASTKGPSVFPLAPCSRSTSESTAALGCLVKDYFPEPVTVSWNSGALTSGVHTFPAVLQSSGLYSLSSVVTVTSSNFGTQTYTCNVDHKPSNTKVDKTV

SEQ ID NO: 14 - protein, 225 aa, synthetic construct
  REGION 1..225: note = Synthetic polypeptide representing artificial human antibody VH chain
QVQLQQSGPGLVKPSQTLSLTCAISGDGVSSNSASWNWVRQSPSRGLEWLGRTYYRSKWYNDYAVSVKSRMTIKSDTSKNQFSLQLNSVTPEDTAVYYCVRGVVGATLDNWGQGTLVTVSSGSASAPTLFPLVSCENSPSDTSSVAVGCLAQDFLPDSITFSWKYKNNSDISSTRGFPSVLRGGKYAATSQVLLPSKDVMQGTDEHVVCKVQHPNGNKEKNVPLP

SEQ ID NO: 15 - protein, 222 aa, synthetic construct
  REGION 1..222: note = Synthetic polypeptide representing artificial human antibody VH chain
QVQLVESGGGVVQPGGSLRLSCGASGFAFSSNGMHWVRQAPGKGLEWVAFIHYDGRNKHYTDSVKGRFAISVDDSKTTLYLQMSSLKTEDTAVYYCVKDSRVTGQSSGYIFDSWGQGTLVTVSSASTKGPSVFPLAPCSRSTSESTAALGCLVKDYFPEPVTVSWNSGALTSGVHTFPAVLQSSGLYSLSSVVTVPSSNFGTQTYTCNVDHKPSNTKVDKTE

SEQ ID NO: 16 - protein, 216 aa, synthetic construct
  REGION 1..216: note = Synthetic polypeptide representing artificial human antibody VH chain
VVQLVESGGGLVKPGGSLRLSCAASGITFSSYDMNWVRQAPGKGLEWVSSISSSSSSIYFADSVKGRFTISRDNAKNSLYLHMNSLRAEDTAVYYCARPRLGWYFDLWGRGTLVTVASASTKGPSVFPLAPSSKSTSGGTAALGCLVKDYFPEPVTVSWNSGALTSGVHTFPAVLQSSGLYSLSSVVTVPSSSLGTQTYICNVNHKPSNTKVDKRV

SEQ ID NO: 17 - protein, 218 aa, synthetic construct
  REGION 1..218: note = Synthetic polypeptide representing artificial human antibody VH chain
QVQLVQSGGEVKKPGASVKVSCKASGYNFTNYGISWVRQAPGQGLEWMGWISAYNGNTNYAQKLQGRVTMTTDTPTSTAYMELRSLRSDDTAVYYCARETAGQLIPFDYWGQGTLVTVSSASTKGPSVFPLAPSSKSTSGGTAALGCLVKDYFPEPVTVSWNSGALTSGVHTFPAVLQSSGLYSLSSVVTVPSSSLGTQTYICNVNHKPSNTKVDKSE

SEQ ID NO: 18 - protein, 222 aa, synthetic construct
  REGION 1..222: note = Synthetic polypeptide representing artificial human antibody VH chain
VEQLVESGGGLVQPGGSLRLSCAASGFSFRSYEMNWVRQAPGKGLEWVSYIGIGGNTIYYADSVKGRFTISRDNAKNSLYLQMNSLRAEDTAVYYCARDYMGVDFYYYYGMDVWGQGTTVTVSSASTKGPSVFPLAPSSKSTSGGTAALGCLVKDYFPEPVTVSWNSGALTSGVHTFPAVLQSSGLYSLSSVVTVPSSSLGTQTYICNVNHKPSNTKVDKRV

SEQ ID NO: 19 - protein, 219 aa, synthetic construct
  REGION 1..219: note = Synthetic polypeptide representing artificial human antibody VH chain
QVQLVQSGAEVKKPGASVKVSCKASGYIFTSYAIHWVRQAPGQRLEWMGWINAGNGNTKYSQKFQGRVTITRDTSANTAYMELSSLRSEDTAIYYCARDIAVAITNYFGSWGQGTLVTVSSASTKGPSVFPLAPSSKSTSGGTAALGCLVKDYFPEPVTVSWNSGALTSGVHTFPAVLQSSGLYSLSSVVTVPSSSLGTQTYICNVNHKPSNTKVDKKV

SEQ ID NO: 20 - protein, 216 aa, synthetic construct
  REGION 1..216: note = Synthetic polypeptide representing artificial human antibody VH chain
QVQLQESGPGLVRPSETLSLTCDVSGYLISSGYYWGWVRQPPGKGLEWIGSVYHSGNAYYNPSLKGRVTMSVDTSKNQFSLKLTSVAAEDTAVYYCAREHRSGYQRYWGQGTLVTVSSASTKGPSVFPLAPSSKSTSGGTAALGCLVKDYFPEPVTVSWNSGALTSGVHTFPAVLQSSGLYSLSSVVTVPSSSLGTQTYICNVNHKPSNTKVDKKV

SEQ ID NO: 21 - protein, 223 aa, synthetic construct
  REGION 1..223: note = Synthetic polypeptide representing artificial human antibody VH chain
QITLKESGPTLVKPTQTLTLTCTFSGFSLNTSGVGVGWIRQPPGKALEWLALIYWDDDERYRPSLKNRLTITRDTSKNQVVLTMTNMDPVDTATYYCAHFSTVINFGHWGQGTLVTVSSGSASAPTLFPLVSCENSPSDTSSVAVGCLAQDFLPDSITFSWKYKNNSDISSTRGFPSVLRGGKYAATSQVLLPSKDVMQGTDEHVVCKVQHPNGNKEKNVPLP

SEQ ID NO: 22 - protein, 115 aa, synthetic construct
  REGION 1..115: note = Synthetic polypeptide representing artificial human antibody VH chain
EVQLVESGGGLVKPGGSLRLSCVGSGFTFSNYSMNWVRQAPGRGLEWVSSISWGSSYINYADSVKGRFTISRDNAKNSLYLQMTSLTAEDTAVYYCACRRIYQGFDPWGQGTLVT

SEQ ID NO: 23 - protein, 215 aa, synthetic construct
  REGION 1..215: note = Synthetic polypeptide representing artificial human antibody VH chain
EVQLVESGGGLVKPGGSLRLSCAASGFTFSSYSMNWVRQAPGKGLEWVSSISSSSRYIYYADSVKGRFTSSRDNAKNSLYLQMNSLRAEDTAVYYCARDRATSFDYWGQGTLVTVSSASTKGPSVFPLAPSSKSTSGGTAALGCLVKDYFPEPVTVSWNSGALTSGVHTFPAVLQSSGLYSLSSVVTVPSSSLGTQTYICNVNHKPSNTKVDKKV

SEQ ID NO: 24 - protein, 213 aa, synthetic construct
  REGION 1..213: note = Synthetic polypeptide representing artificial human antibody VH chain
PVLLQESGPGLVKPSETLSLTCTVSGDSMSFYYWTWIRQPPGKGLEWIGYIYYSGNRNYNPSLNSRVTISVDTSKNEVSLKLTSVTAADTAAYYCARGRGEMDVWGQGTTVTVSSASTKGPSVFPLAPSSKSTSGGTAALGCLVKDYFPEPVTVSWNSGALTSGVHTFPAVLQSSGLYSLSSVVTVPSSSLGTQTYICNVNHKPSNTKVDKRV

SEQ ID NO: 25 - protein, 220 aa, synthetic construct
  REGION 1..220: note = Synthetic polypeptide representing artificial human antibody VH chain
QVQLQESGPGLVKPTQTLSLTCTVSGGSISSGSYYWNWIRQPAGKGLEWIGNIYTSGNTDYNPSLKSRVTISLDTSKNQVSLNLTSVTAADTAVYYCATTPSSSWYWYFDPWGQGTLVTVSSASTKGPSVFPLAPSSKSTSGGTAALGCLVKDYFPEPVTVSWNSGALTSGVHTFPAVLQSSGLYSLSSVVTVPSSSLGTQTYICNVNHKPSNTKVDKSE

SEQ ID NO: 26 - protein, 221 aa, synthetic construct
  REGION 1..221: note = Synthetic polypeptide representing artificial human antibody VH chain
EVQLVESGGGLVKPGGSLRLSCAGSGFSFSSYSMNWVRQAPGKGLEWVSSISSKSSSKNYIDSVKNRFIISRDNAKNSLYLQMNSLRAEDTAVYYCARDLELIIAAGAPLDHWGQGTLVTVSSASTKGPSVFPLAPSSKSTSGGTAALGCLVKDYFPEPVTVSWNSGALTSGVHTFPAVLQSSGLYSLSSVVTVPSSSLGTQTYICNVNHKPSNTKVDKRE

SEQ ID NO: 27 - protein, 222 aa, synthetic construct
  REGION 1..222: note = Synthetic polypeptide representing artificial human antibody VH chain
PLQLQESGPGLVKPSETLSLTCTVSGGSISRSPYFWGWIRQPPGRGLEWIASIYYRGTTSYNPSLKSRVTISVDTSKNQFSLKLRSVTAADTAVFYCARLVTSPEEGGPWFDPWGRGTLVTVSSASTKGPSVFPLAPSSKSTSGGTAALGCLVKDYFPEPVTVSWNSGALTSGVHTFPAVLQSSGLYSLSSVVTVPSSSLGTQTYICNVNHKPSNTKVDKKV

SEQ ID NO: 28 - protein, 119 aa, synthetic construct
  REGION 1..119: note = Synthetic polypeptide representing artificial human antibody VH chain
QVQLVESGGGVVQPGRSLRLSCAASGFTFTSYGMHWVRQAPGKGLEWVALIWYDGSNKYYADSVKGRFTISRDNSKNTLYLQMNSLRAEDTAVYYCARDTEVGHHFDYWGQGTLITVSS

SEQ ID NO: 29 - protein, 219 aa, synthetic construct
  REGION 1..219: note = Synthetic polypeptide representing artificial human antibody VH chain
QVQLQESGPGLVKPSETLSLTCTVSSGSSGSYYLSWIRQPAGKGLEWIGRMYTSGSTHYNPSLKSRVTMSVDTSKNQFSLKLSSVTAADTAVYYCAKPWRSDGFDVWGQGTVVTVSSASPTSPKVFPLSLCSTQPDGNVVIACLVQGFFPQEPLSVTWSESGQGVTARNFPPSQDASGDLYTTSSQLTLPATQCLAGKSVTCHVKHYTNPSQDVTVPCP

SEQ ID NO: 30 - protein, 216 aa, synthetic construct
  REGION 1..216: note = Synthetic polypeptide representing artificial human antibody VH chain
QVQLVQSGAEVKKPGASVKVSCKASGYNFRDYYMHWVRQAPGQGLEWMGWINPNSGGTISAQNFQGRVTMTRDTSISTAYMEVNSLRSDDTAVYYCAVGMVTDGFEIWGQGTLVTVSSASTKGPSVFPLAPSSKSTSGGTAALGCLVKDYFPEPVTVSWNSGALTSGVHTFPAVLQSSGLYSLSSVVTVPSSSLGTQTYICNVNHKPSNTKVDKRV

SEQ ID NO: 31 - protein, 222 aa, synthetic construct
  REGION 1..222: note = Synthetic polypeptide representing artificial human antibody VH chain
QVQLQESGSGLVRPSQTLSLTCTVSGGSINSGDYHWSWIRQPPGKDLEYIGYIHHTGSAYYNPSLKSRVTISVDTSKNQHSLRLTSVTAADTAVYYCARLDLRTVRFDPWGQGTLVTVSSASPTSPKVFPLSLCSTQPDGNVVIACLVQGFFPQEPLSVTWSESGQGVTARNFPPSQDASGDLYTTSSQLTLPATQCLAGKSVTCHVKHYTNPSQDVTVPCP

SEQ ID NO: 32 - protein, 226 aa, synthetic construct
  REGION 1..226: note = Synthetic polypeptide representing artificial human antibody VH chain
PLQLQESGPGLAKPSETLSLTCTASGGSISSSGYYWGWIRQPPGKGLEWIGSIYYSGDTYYNPSLKSRVNIAVDTSQNQFSLKLNSVTAADTAVYYCARHSSGPPRLAFDIWGQGTMVTVSSGSASAPTLFPLVSCENSPSDTSSVAVGCLAQDFLPDSITFSWKYKNNSDISSTRGFPSVLRGGKYAATSQVLLPSKDVMQGTDEHVVCKVQHPNGNKEKNVPLP

SEQ ID NO: 33 - protein, 218 aa, synthetic construct
  REGION 1..218: note = Synthetic polypeptide representing artificial human antibody VH chain
QVQLVESGGGVVQPGRSLRLSCAASGFTFSSYGMHWVRQVPGKGLEGVAVISHDGSNKYYADSVKGRFTISRDNSKNTLYLQMNSLRVEDTAVYYCAKDFAMPTVTTDYWGQGTLVTVSSASTKGPSVFPLAPSSKSTSGGTAALGCLVKDYFPEPVTVSWNSGALTSGVHTFPAVLQSSGLYSLSSVVTVPSSSLGTQTYICNVNHKPSNTKVDKNE

SEQ ID NO: 34 - protein, 121 aa, synthetic construct
  REGION 1..121: note = Synthetic polypeptide representing artificial human antibody VH chain
QITLKESGPTLVKPTQTLTLTCTFSGFSLTTSGVGVGWIRQPPGKALEWLALIYWDDDKRYSPSLRSRLTITKDTSKNQVVLTMTNMDPVDTATYYCVHRPSLAYWYFDVWGRGTLLTVSS

SEQ ID NO: 35 - protein, 219 aa, synthetic construct
  REGION 1..219: note = Synthetic polypeptide representing artificial human antibody VH chain
VVQLVESGGGLVQPGGSLRLSCAASGFTFSTYELNWVRQAPGKGLEWISYINTTSDPIYYADSVKGRFTISRDNAKNSVFLQMNSLRAEDTAVYYCVREGDSRKYYSLDYWGQGTLVTVSSASTKGPSVFPLAPSSKSTSGGTAALGCLVKDYFPEPVTVSWNSGALTSGVHTFPAVLQSSGLYSLSSVVTVPSSSLGTQTYICNVNHKPSNTKVDKRV

SEQ ID NO: 36 - protein, 218 aa, synthetic construct
  REGION 1..218: note = Synthetic polypeptide representing artificial human antibody VH chain
PVQLVQSGAEVKKPGSSVKVSCKASGGTFSSYAISWVRQAPGQGLEWMGGIIPIFGTANYAQKFQGRVTITADESTSTAYMELSSLRSEDTAVYYCARDPMWVSYAFDIWGQGTMVTVSSASTKGPSVFPLAPSSKSTSGGTAALGCLVKDYFPEPVTVSWNSGALTSGVHTFPAVLQSSGLYSLSSVVTVPSSSLGTQTYICNVNHKPSNTKVDKNE

SEQ ID NO: 37 - protein, 215 aa, synthetic construct
  REGION 1..215: note = Synthetic polypeptide representing artificial human antibody VH chain
PVQLQESGPGLVKPSETLSLTCTVSGGSISSDNYYWSWLRQHPGKGLEWIGYIYFSVTTYYNPSLKSRVTISLDTSKNQFSLKLSSVTAADTAVYYCASGYVSFDLWGQGTLVTVSSASTKGPSVFPLAPSSKSTSGGTAALGCLVKDYFPEPVTVSWNSGALTSGVHTFPAVLQSSGLYSLSSVVTVPSSSLGTQTYICNVNHKPSNTKVDKRV

SEQ ID NO: 38 - protein, 220 aa, synthetic construct
  REGION 1..220: note = Synthetic polypeptide representing artificial human antibody VH chain
QVQLQESGPGLVKPSETLSLTCNVSGASISSYYWSWIRQPPGKGLEWIGYLSYSGNTNSKPSLKSRVTISVDTSKNQFSLKLSSVTAADTAVYYCAREGAYESSGPDPFDIWGQGTMVTVSSASTKGPSVFPLAPSSKSTSGGTAALGCLVKDYFPEPVTVSWNSGALTSGVHTFPAVLQSSGLYSLSSVVTVPSSSLGTQTYICNVNHKPSNTKVDKRV

SEQ ID NO: 39 - protein, 220 aa, synthetic construct
  REGION 1..220: note = Synthetic polypeptide representing artificial human antibody VH chain
QVQVVQSGAEVKKPGASVKISCKASGNTFTTYTIQWVRQVPGQRLEWMGWINAGNGDIKYSQKFQDRVTITRDTSANTAYMELSSLRYEDTAVYFCASLFLTYYGSGTYYRWGQGTLVTVSSASTKGPSVFPLAPSSKSTSGGTAALGCLVKDYFPEPVTVSWNSGALTSGVHTFPAVLQSSGLYSLSSVVTVPSSSLGTQTYICNVNHKPSNTKVDKSE

SEQ ID NO: 40 - protein, 216 aa, synthetic construct
  REGION 1..216: note = Synthetic polypeptide representing artificial human antibody VH chain
EVQLLESGGGLVQPGGSLRLSCAASGFTFSSYAMSWVRQAPGKGLEWVSTISGSGHSTYYADSVKGRFTISRDNSKNTLYLQMNSLRAEDTAVYYCAKSTLGGGFDFWGQGTLVTVSSASTKGPSVFPLAPSSKSTSGGTAALGCLVKDYFPEPVTVSWNSGALTSGVHTFPAVLQSSGLYSLSSVVTVPSSSLGTQTYICNVNHKPSNTKVDKKV

SEQ ID NO: 41 - protein, 223 aa, synthetic construct
  REGION 1..223: note = Synthetic polypeptide representing artificial human antibody VH chain
VVQLVESGGGVVRPGGSLRLSCAASGFTFDDYGMSWVRQAPGKGLEWVSGINWNGGSTGYADSVKGRFTISRDNAKNSLYLQMNSLRAEDTALYHCARVGSSSWYSSGRSPFDYWGQGTLVTVSSASTKGPSVFPLAPSSKSTSGGTAALGCLVKDYFPEPVTVSWNSGALTSGVHTFPAVLQSSGLYSLSSVVTVPSSSLGTQTYICNVNHKPSNTKVDKRV

SEQ ID NO: 42 - protein, 221 aa, synthetic construct
  REGION 1..221: note = Synthetic polypeptide representing artificial human antibody VH chain
QVQLVESGGGVVQPGRSLRLSCAASGFTFSSYGMHWVRQAPGKGLEWVAVISYDGSNKYYADSVKGRFTISRDNSKNTLYLQMNSLRAEDTAVYYCAKDQIVLEMATSPFDYWGQGTLVTVSSASTKGPSVFPLAPCSRSTSESTAALGCLVKDYFPEPVTVSWNSGALTSGVHTFPAVLQSSGLYSLSSVVTVPSSNFGTQTYTCNVDHKPSNTKVDKTV

SEQ ID NO: 43 - protein, 223 aa, synthetic construct
  REGION 1..223: note = Synthetic polypeptide representing artificial human antibody VH chain
QVQLQESGPGLVKPSQTLSLTCTVSGGSISSGGYYWSWIRQHPGKGLEWIGYIYYSGSTYYNPSLKSRVTISVDTSKNQFSLKLSSVTAADTAVYYCARDLSCSSTSCHDAFDIWGQGTMVTVSSASTKGPSVFPLAPSSKSTSGGTAALGCLVKDYFPEPVTVSWNSGALTSGVHTFPAVLQSSGLYSLSSVVTVPSSSLGTQTYICNVNHKPSNTKVDKSE

SEQ ID NO: 44 - protein, 123 aa, synthetic construct
  REGION 1..123: note = Synthetic polypeptide representing artificial human antibody VH chain
QVQLVQSGAEVKKPGASVKVSCKASGYTFTGYYLHWVRQAPGQGLEWMGRINPNSGGTNYAQNFQGRVTMTRDTSISTAYMELSSLKSDDTAVFFCARGPNFHESIRDGFDIWGQGTMVTVSS

SEQ ID NO: 45 - protein, 118 aa, synthetic construct
  REGION 1..118: note = Synthetic polypeptide representing artificial human antibody VH chain
EVQLVESGGGLVQPGGSLRLSCAASGFTFSSYDFHWVRQPTGKGLEWVSAIGTAGDTLYLDSVKGRFTISRENAKNSLYLQMNSLRAGDTAVYYCARVNWNSDTFDSWGQGTLVTVSS

SEQ ID NO: 46 - protein, 229 aa, synthetic construct
  REGION 1..229: note = Synthetic polypeptide representing artificial human antibody VH chain
QVQLVESGGGVVQPGRSLRLSCAASGFTFRSYGMHWARQAPGRGLEWVAVISYDGSNSYYADSVKGRFTISRDNSKNTLYLEMNSLRADDTAVYYCARDPGRDPYLDLDYHYGMDVWGQGTTVTVSSASPTSPKVFPLSLCSTQPDGNVVIACLVQGFFPQEPLSVTWSESGQGVTARNFPPSQDASGDLYTTSSQLTLPATQCLAGKSVTCHVKHYTNPSQDVTVPCP

SEQ ID NO: 47 - protein, 221 aa, synthetic construct
  REGION 1..221: note = Synthetic polypeptide representing artificial human antibody VH chain
QVQLVESGGGLVEPGGSLRLSCAASGFTFSDYYMSWIRQAPGKRLEWISHMSSGGNRRHYADSVRGRFTISRDNAKNSLYLQMNSMRADDTAVYYCARDKRSGMTSDRRIDYWGQGTRVTVSSASTKGPSVFPLAPSSKSTSGGTAALGCLVKDYFPEPVTVSWNSGALTSGVHTFPAVLQSSGLYSLSSVVTVPSSSLGTQTYICNVNHKPSNTKVDKRV

SEQ ID NO: 48 - protein, 217 aa, synthetic construct
  REGION 1..217: note = Synthetic polypeptide representing artificial human antibody VH chain
VVQLGESGGGLVKPGGSLRLSCAASGFTFSSYHMNWVRQSPEKGLEWVSYISSSGTYIDYADSVRGRFTISRDNAKNSLYLQMNILRPDDTAVYYCSGGYYSSSHMDVWGKGTTVTVSSASTKGPSVFPLAPSSKSTSGGTAALGCLVKDYFPEPVTVSWNSGALTSGVHTFPAVLQSSGLYSLSSVVTVPSSSLGTQTYICNVNHKPSNTKVDKRV

SEQ ID NO: 49 - protein, 218 aa, synthetic construct
  REGION 1..218: note = Synthetic polypeptide representing artificial human antibody VH chain
QVQLVESGGGVVQPGRSLRLSCAASGFTFSSYAMHWVRQAPGKGLEWVAVISYDGSNKYYADSLKGRFTISRDNSKDTLYLQVNSLRPEDTAVYYCARVNIAAAGTLDYWGQGTLVTVSSASTKGPSVFPLAPSSKSTSGGTAALGCLVKDYFPEPVTVSWNSGALTSGVHTFPAVLQSSGLYSLSSVVTVPSSSLGTQTYICNVNHKPSNTKVDKNE

SEQ ID NO: 50 - protein, 226 aa, synthetic construct
  REGION 1..226: note = Synthetic polypeptide representing artificial human antibody VH chain
EVQLVESGGGLVEPGRSLRLSCAASGFTLEEFAMHWVRQVPGKGLEWVSAISWNSGSIAYADSVKGRFTISRDNAKNSLYLQMDSLRAEDTALYYCVKDMGPAGTASAYHYHNGMDVWGQGTTVTVSSASTKGPSVFPLAPSSKSTSGGTAALGCLVKDYFPEPVTVSWNSGALTSGVHTFPAVLQSSGLYSLSSVVTVPSSSLGTQTYICNVNHKPSNTKVDKRE

SEQ ID NO: 51 - protein, 216 aa, synthetic construct
  REGION 1..216: note = Synthetic polypeptide representing artificial human antibody VH chain
QVQLQESGPGLVKPSETLSLTCTVSGGSISDYYWSWIRQPPGKELEWIGYIYYSGSTNYNPSLKSRVTISVDTSKNQFSLKLSSVTAADTAVYYCARLTTSTSALSYWGQGTLVTVSSASTKGPSVFPLAPSSKSTSGGTAALGCLVKDYFPEPVTVSWNSGALTSGVHTFPAVLQSSGLYSLSSVVTVPSSSLGTQTYICNVNHKPSNTKVDKSE

SEQ ID NO: 52 - protein, 221 aa, synthetic construct
  REGION 1..221: note = Synthetic polypeptide representing artificial human antibody VH chain
PVQLVQSGAEVKKPGSSVKVSCKASGGTFSSYAISWVRQAPGQGLEWMGGIIPIFGTANYAQKFQGRVTITADESTSTAYMELSSLRSEDTAVYYCARENWNSAGTTEWFDPWGQGTLVTVSSASTKGPSVFPLAPSSKSTSGGTAALGCLVKDYFPEPVTVSWNSGALTSGVHTFPAVLQSSGLYSLSSVVTVPSSSLGTQTYICNVNHKPSNTKVDKRV

SEQ ID NO: 53 - protein, 117 aa, synthetic construct
  REGION 1..117: note = Synthetic polypeptide representing artificial human antibody VH chain
QVQLVQSGAEVKKPGASVKVSCKASGYTFSSYGISWVRQAPGQGLEWMGWINGYNGNTNYAQKLQGRVTMTTDTSTSTAYMDLRSLRSDDTAVYYCARDTLQKGDYWGQGTLVTVSS

SEQ ID NO: 54 - protein, 224 aa, synthetic construct
  REGION 1..224: note = Synthetic polypeptide representing artificial human antibody VH chain
VVQLVESGGGLVQPGGSLRLSCAASGFTFRSYEMNWVRQAPGKGLEWVSYITSSGDTIYHADSVKGRFTISRDNTKNSLYLQMTGLRTEDTAVYYCARASRVLESKSWHGDAFDVWGRGTRVIVSSASTKGPSVFPLAPSSKSTSGGTAALGCLVKDYFPEPVTVSWNSGALTSGVHTFPAVLQSSGLYSLSSVVTVPSSSLGTQTYICNVNHKPSNTKVDKKV

SEQ ID NO: 55 - protein, 218 aa, synthetic construct
  REGION 1..218: note = Synthetic polypeptide representing artificial human antibody VH chain
QVQLVQSGAEVKKPGSSVKVSCKASGGTFSSYAISWVRQAPGQGLEWMGGIIPIFGTTNYAQKFQGRVTITADESTSTAYMELSSLRSEDTAVYYCARGLGGSGYYFDYWGQGTLVTVSSASTKGPSVFPLAPSSKSTSGGTAALGCLVKDYFPEPVTVSWNSGALTSGVHTFPAVLQSSGLYSLSSVVTVPSSSLGTQTYICNVNHKPSNTKVDKNE

SEQ ID NO: 56 - protein, 124 aa, synthetic construct
  REGION 1..124: note = Synthetic polypeptide representing artificial human antibody VH chain
EVQLVQSGAEVKKPGESLKISCRGSGDSFNKYFIGWVRQVPGKALEWMGIIYPGDSDTRYSPSFQGQVTISADKSINIAYLQWTSLKASDTAMYYCARQAFCGANCWSGAYDIWGQGTMVTVSS

SEQ ID NO: 57 - protein, 224 aa, synthetic construct
  REGION 1..224: note = Synthetic polypeptide representing artificial human antibody VH chain
QVQLVESGGGVVQPGRSLRLSCAASGFTFSTYGMNWVRQAPGKGLEWVAVTWYEGTNEEYADSVKGRFTISRDNSKNTVYLQMNSLRVDDTAVYYCVRRGATVFQGKIIKGYMDVWGKGTTVTVSSASTKGPSVFPLAPSSKSTSGGTAALGCLVKDYFPEPVTVSWNSGALTSGVHTFPAVLQSSGLYSLSSVVTVPSSSLGTQTYICNVNHKPSNTKVDKRE

SEQ ID NO: 58 - protein, 215 aa, synthetic construct
  REGION 1..215: note = Synthetic polypeptide representing artificial human antibody VH chain
VVQLLESGGGLVQPGGSLRLSCTASGFAFSSYAMTWVRQAPGKGLEWVSVMSGSGAGTYYADAVKGRFTISRDNSKNTLYLQMESLRVEDTAVYYCAKVKGGSNDYWGQGTLVTVSSASTKGPSVFPLAPSSKSTSGGTAALGCLVKDYFPEPVTVSWNSGALTSGVHTFPAVLQSSGLYSLSSVVTVPSSSLGTQTYICNVNHKPSNTKVDKNE

SEQ ID NO: 59 - protein, 218 aa, synthetic construct
  REGION 1..218: note = Synthetic polypeptide representing artificial human antibody VH chain
QVQLVESGGGVVQPGRSLRLSCAASGFTFSNHAMHWVRQAPGKGLEWVAVISYDGGTKYYADSVKGRFTISRDKSKNTLYLQMNSLRPEDTALYYCARHLYGDFYYLDYWGQGTLVTVSSASTKGPSVFPLAPSSKSTSGGTAALGCLVKDYFPEPVTVSWNSGALTSGVHTFPAVLQSSGLYSLSSVVTVPSSSLGTQTYICNVNHKPSNTKVDKRG

SEQ ID NO: 60 - protein, 218 aa, synthetic construct
  REGION 1..218: note = Synthetic polypeptide representing artificial human antibody VH chain
QVQLVESGGGVVRPGRSLRLSCAASGFTFSSHGMHWVRQAPGKGLEWVAVIWYDGSTKYYTDSVKGRFTISRDNSKNTLFLQLNSLRAEDTAVYYCARDHRTGSYYPDYWGQGTLVTVSSTSTKGPSVFPLAPSSKSTSGGTAALGCLVKDYFPEPVTVSWNSGALTSGVHTFPAVLQSSGLYSLSSVVTVPSSSLGTQTYICNVNHKPSNTKVDKRV

SEQ ID NO: 61 - protein, 221 aa, synthetic construct
  REGION 1..221: note = Synthetic polypeptide representing artificial human antibody VH chain
QVQLQESGPGLVKPSETLSLTCTVSGGSVDNVDSYWSWIRQPPGKGLEWIAYIYFTGSTNYNPSLKSRVTISIDTSKNQFSLKVNAVTAADTAVYYCARGVRQQQVRKWFDPWGRGTLVTVSSASTKGPSVFPLAPSSKSTSGGTAALGCLVKDYFPEPVTVSWNSGALTSGVHTFPAVLQSSGLYSLSSVVTVPSSSLGTQTYICNVNHKPSNTKVDKNE

SEQ ID NO: 62 - protein, 223 aa, synthetic construct
  REGION 1..223: note = Synthetic polypeptide representing artificial human antibody VH chain
PVQLVQSGAEVKKPGESLKISCKGSGYSFTTYWIGWVRQMPGKGLEWMGIIYPGDSDTRYSPSFQGQVTISADKSISTAYLQWNSLKASDTAMYYCAMDNSGSGGVDYWGQGTLVTVSSGSASAPTLFPLVSCENSPSDTSSVAVGCLAQDFLPDSITFSWKYKNNSDISSTRGFPSVLRGGKYAATSQVLLPSKDVMQGTDEHVVCKVQHPNGNKEKNVPLP

SEQ ID NO: 63 - protein, 218 aa, synthetic construct
  REGION 1..218: note = Synthetic polypeptide representing artificial human antibody VH chain
QVQLQESGPGLVKPSQTLPLTCTVSGDSISSGSYYWSWIRQPAGKGLEWIGRIYTSGSTKYNPSLKSRATISIDTSKNQFSLKLSSVTAADTAVYYCARDSYHYYGMDVWGQGTTVTVSSASTKGPSVFPLAPSSKSTSGGTAALGCLVKDYFPEPVTVSWNSGALTSGVHTFPAVLQSSGLYSLSSVVTVPSSSLGTQTYICNVNHKPSNTKVDKSE

SEQ ID NO: 64 - protein, 224 aa, synthetic construct
  REGION 1..224: note = Synthetic polypeptide representing artificial human antibody VH chain
QVQLQQSGPGLVKPSQTLSLTCAISGDSVSSNSAAWHWIRQSPSRGLEWLGRTHYRSKWYNEYAVSVKSRITINPDISKNQFSLQLSSVTPEDTAVYYCARETVYISTYYYGLDVWGQGTTVTVSSASTKGPSVFPLAPSSKSTSGGTAALGCLVKDYFPEPVTVSWNSGALTSGVHTFPAVLQSSGLYSLSSVVTVPSSSLGTQTYICNVNHKPSNTKVDKKV

SEQ ID NO: 65 - protein, 218 aa, synthetic construct
  REGION 1..218: note = Synthetic polypeptide representing artificial human antibody VH chain
PVQLIQSGAEVRKPGASVKVSCKVSGYTLSELSLHWVRQAPGKGLEWMGTFDPEDGETVYAQKFQGRVTVTEDTSTDTAYIDLSSLKSEDTAVYYCATDGPLHTSGLDYWGQGTLVTVSSASTKGPSVFPLAPCSRSTSESTAALGCLVKDYFPEPVTVSWNSGALTSGVHTFPAVLQSSGLYSLSSVVTVPSSSLGTQTYICNVNHKPSNTKVDKRV

SEQ ID NO: 66 - protein, 218 aa, synthetic construct
  REGION 1..218: note = Synthetic polypeptide representing artificial human antibody VH chain
VVQLVESGGGLVKPGGSLRLSCAASGFTFSSYSMNWVRQAPGKGLEWVSSISSSSSYIYYADSVKGRFTISRDNAKNSLYLQMNSLRAEDTAVYYCACLGAEANDAFDIWGQGTMVTVSSASTKGPSVFPLAPSSKSTSGGTAALGCLVKDYFPEPVTVSWNSGALTSGVHTFPAVLQSSGLYSLSSVVTVPSSSLGTQTYICNVNHKPSNTKVDKRV

SEQ ID NO: 67 - protein, 212 aa, synthetic construct
  REGION 1..212: note = Synthetic polypeptide representing artificial human antibody VH chain
EVQLLESGGGLVQPGGSLRLSCAASGFTFSNYAMNWVRQAPGKGLDWVSAISGSGGSTYYADSVKGRFTISRDISKNTLYLQMNSLRAEDTAVYYCAKVPGDYWGQGTLVTVSSASTKGPSVFPLAPSSKSTSGGTAALGCLVKDYFPEPVTVSWNSGALTSGVHTFPAVLQSSGLYSLSSVVTVPSSSLGTQTYICNVNHKPSNTKVDKNE

SEQ ID NO: 68 - protein, 220 aa, synthetic construct
  REGION 1..220: note = Synthetic polypeptide representing artificial human antibody VH chain
QVKLVQSGAEVKKPGSSVKVSCKTSGGPFSSYTITWVRQAPGQGPEWMGRITPIFNITNYAQNFQGRMTMTADKSTTTAYMELSGLKSEDTAVYYCARAGLSTSWPSWFDPWGQGTLVTVSSASTKGPSVFPLAPSSKSTSGGTAALGCLVKDYFPEPVTVSWNSGALTSGVHTFPAVLQSSGLYSLSSVVTVPSSSLGTQTYICNVNHKPSNTKVDKKV

SEQ ID NO: 69 - protein, 220 aa, synthetic construct
  REGION 1..220: note = Synthetic polypeptide representing artificial human antibody VH chain
QVQLQESGPGLVKPSQTLSLTCTVSGGSVNTGTSYWTWVRQRPGKGLEWIGFIYYSGSTYYNPALESRLTISLDTSQNQFSLKLTSVTAADTAVYFCARNDISFKQSAIDVWGQGTTVTVSSASTKGPSVFPLAPSSKSTSGGTAALGCLVKDYFPEPVTVSWNSGALTSGVHTFPAVLQSSGLYSLSSVVTVPSSSLGTQTYICNVNHKPSNTKVDKRV

SEQ ID NO: 70 - protein, 222 aa, synthetic construct
  REGION 1..222: note = Synthetic polypeptide representing artificial human antibody VH chain
QVHLAESGGGVVQTGGSLRLSCAVSGFHFGSHGMTWVRQAPGKGLEWLSFITYDGQIKYYGGSVKGRFNISRDNSKNTLHLHMNGLRVEDTAVYYCAKTKTMGVGGEYFGLDVWGLGTTVIVSSASTKGPSVFPLAPSSKSTSGGTAALGCLVKDYFPESVTVSWNSGALTSGVHTFPAVLQSSGLYSLSSVVTVPSSSLGTQTYICNVNHKPSNTKVDKKV

SEQ ID NO: 71 - protein, 222 aa, synthetic construct
  REGION 1..222: note = Synthetic polypeptide representing artificial human antibody VH chain
PLQLHESGPGLAKPSETLSLTCTLSGGSITTGSYYWAWIRQAPGKALEWIGTIYYSGTTYYNSSLNNRLTISVDTSKNQLSLKLVSVAAADTAIYYCARHKALWFGEAGAFDIWGQGTMVTVSSASTKGPSVFPLAPSSKSTSGGTAALGCLVKDYFPEPVTVSWNSGALTSGVHTFPAVLQSSGLYSLSSVVTVPSSSLGTQTYICNVNHKPSNTKVDKKV

SEQ ID NO: 72 - protein, 223 aa, synthetic construct
  REGION 1..223: note = Synthetic polypeptide representing artificial human antibody VH chain
EVQLVESGGGLVQPGRSLRLSCAASGFTFDDYAMHWVRQAPGKGLEWVSGISWNSGSIGYADSVKGRFTISRDNAKNSLYLQMNSLRAEDTALYYCAKDLLGFRDQRNYYGMDVWGQGTTVTVSSASTKGPSVFPLAPSSKSTSGGTAALGCLVKDYFPEPVTVSWNSGALTSGVHTFPAVLQSSGLYSLSSVVTVPSSSLGTQTYICNVNHKPSNTKVDKRV

SEQ ID NO: 73 - protein, 119 aa, synthetic construct
  REGION 1..119: note = Synthetic polypeptide representing artificial human antibody VH chain
QVQLQESGPGLVKPSETLSLSCTVSGASMNNYYWSWIRQSAGKGLEWIGRIYSSGDTDYNPSLKTRVTMSIDTSKNQFSLNLDSVTAADTATYYCARSFYDTLFYFENWGQGTLVTVSS

SEQ ID NO: 74 - protein, 218 aa, synthetic construct
  REGION 1..218: note = Synthetic polypeptide representing artificial human antibody VH chain
QITLKESGPTLVKPTQTLTLTCTFSGFSLTTTDVGVGWIRQPPGKALEWLTIIYWDDDERYSPSLKSRLTITKDTSKNQVVLSMTNMDPVDTATYYCARVYSTKWDFDYWGQGTLVTVSSASTKGPSVFPLAPSSKSTSGGTAALGCLVKDYFPEPVTVSWNSGALTSGVHTFPAVLQSSGLYSLSSVVTVPSSSLGTQTYICNVNHKPSNTKVDKRV

SEQ ID NO: 75 - protein, 216 aa, synthetic construct
  REGION 1..216: note = Synthetic polypeptide representing artificial human antibody VH chain
VVQLVESGGGLVQPGGSLRLSCAASGFTFSSYSMNWVRQAPGKGLEWLSYVSSSGSTMYYADSVKGRFTISRDTAKNSLFLQMNSLRAEDTAVYYCAKGGPLRPFDIWGQGTLVTVSSASTKGPSVFPLAPSSKSTSGGTAALGCLVKDYFPEPVTVSWNSGALTSGVHTFPAVLQSSGLYSLSSVVTVPSSSLGTQTYICNVNHKPSNTKVDKKV

SEQ ID NO: 76 - protein, 226 aa, synthetic construct
  REGION 1..226: note = Synthetic polypeptide representing artificial human antibody VH chain
AVQLVQSGAEVKKPGESLKISCRGSGYNFISHWISWVRQMPGKGLEWQWLGRIDPSDSYTNYSPSFRGHVTISVDKSVNTAYLQWNSLKASDTAMYYCARLSRDGYTIEHFDYWGQGTLVTVSSASPTSPKVFPLSLDSTPQDGNVVVACLVQGFFPQEPLSVTWSESGQNVTARNFPPSQDASGDLYTTSSQLTLPATQCPDGKSVTCHVKHYTNPSQDVTVPCP

SEQ ID NO: 77 - protein, 224 aa, synthetic construct
  REGION 1..224: note = Synthetic polypeptide representing artificial human antibody VH chain
EVQLVQSGAEVKKPGESLKISCKGSGYSFTSFWIGWVRQMPGKGLEWMGIIFPADSDTRYSPSFQGQVIISVDKSISTAYLQWSSLKASDTAMYYCARRGVSGGSAWTYYNFFDPWGQGTLVTVASASTKGPSVFPLAPSSKSTSGGTAALGCLVKDYFPEPVTVSWNSGALTSGVHTFPAVLQSSGLYSLSSVVTVPSSSLGTQTYICNVNHKPSNTKVDKKV

SEQ ID NO: 78 - protein, 222 aa, synthetic construct
  REGION 1..222: note = Synthetic polypeptide representing artificial human antibody VH chain
PVQLQESGPGLVKPSETLSLTCTVSGGSIDSYYWSWLRQPPGRGLEWIGYIFYSGITNYSPSLKSRVTISVDTSKNQFSLKLNSVTAADTAVYYCARELPVIGRRTFDIWGQGTMVTVSSASPTSPKVFPLSLCSTQPDGNVVIACLVQGFFPQEPLSVTWSESGQGVTARNFPPSQDASGDLYTTSSQLTLPATQCLAGKSVTCHVKHYTNPSQDVTVPCP

SEQ ID NO: 79 - protein, 227 aa, synthetic construct
  REGION 1..227: note = Synthetic polypeptide representing artificial human antibody VH chain
PVHLVQSGAEVKKPGSSVKVSCKLSGGIFSYFAIIWVRQAPGQGLEWMGTIIPIFGTSNYAEKFQDRVAIVADEATSTVYMEVNSLRSEDTAIYFCARDSEVEKSDGYMASTAEYFQLWGQGTLVTVSSASTKGPSVFPLAPSSKSTSGGTAALGCLVKDYFPEPVTVSWNSGALTSGVHTFPAVLQSSGLYSLSSVVTVPSSSLGTQTYICNVNHKPSNTKVDKKV

SEQ ID NO: 80 - protein, 221 aa, synthetic construct
  REGION 1..221: note = Synthetic polypeptide representing artificial human antibody VH chain
SAMHLVESGGAVVQPGESLRLSCSAFEFSFQYFSMFWVRQAPTKGLELVAQITWDGSIINYADSVKGRFTISRDNSKNSLYLQMTSLRSDDTAVYYCVKAGVPWEVQRWFDPWGQGTPVTVSSASTKGPSVFPLAPCSRSTSESTAALGCLVKDYFPEPVTVSWNSGALTSGVHTFPAVLQSSGLYSLSSVVTVPSSNFGTQTYTCNVDHKPSNTKVDKTV

SEQ ID NO: 81 - protein, 222 aa, synthetic construct
  REGION 1..222: note = Synthetic polypeptide representing artificial human antibody VH chain
QVHLVQSGAEVKRPGASVKVSCKGSGYTLNNDVAFSWVRQAPGQGPEWLGWINAYQGVTNISPNFRARVTMTTDTSTNTIYMDLQNLRSDDTAIYYCARDRQGLGRMDVWGQGTTVIVSSASPTSPKVFPLSLCSTQPDGNVVIACLVQGFFPQEPLSVTWSESGQGVTARNFPPSQDASGDLYTTSSQLTLPATQCLAGKSVTCHVKHYTNPSQDVTVPCP

SEQ ID NO: 82 - protein, 217 aa, synthetic construct
  REGION 1..217: note = Synthetic polypeptide representing artificial human antibody VH chain
VVQLVESGGGLVQPGGSLRLSCAASGFRFNYYWMSWVRQAPGKGLEWVANIKEDGSEKYYVDSVKGRFTISRDNAKNSLYLEMNSLRVEDTAVYYCARELGANYYFAYWGQGALVTVSSASTKGPSVFPLAPSSKSTSGGTAALGCLVKDYFPEPVTVSWNSGALTSGVHTFPAVLQSSGLYSLSSVVTVPSSSLGTQTYICNVNHKPSNTKVDKRV

SEQ ID NO: 83 - protein, 221 aa, synthetic construct
  REGION 1..221: note = Synthetic polypeptide representing artificial human antibody VH chain
QVQLQESGPGLVKPSQTLSLTCIVSGGSISGDKNFWSWVRQHPEKGLEWLGYISYNGNTYYNPSLISRIIISLDTPKNLFSLRLSSVTVADTAIYYCAREVDIRGDSDAFDIWGRGTVVTVSSASTKGPSVFPLAPCSRSTSESTAALGCLVKDYFPEPVTVSWNSGALTSGVHTFPAVLQSSGLYSLSSVVTVTSSNFGTQTYTCNVDHKPSNTKVDKTV

SEQ ID NO: 84 - protein, 218 aa, synthetic construct
  REGION 1..218: note = Synthetic polypeptide representing artificial human antibody VH chain
QVRLVESGGGLVQPGGFLRLSCAASGFTFSDYEMNWVRQAPGKGLEWISHIGSSGTYADSVKGRFTISRDNAKNSLYLQMSSLRAEDAGVYYCATTRNSAFLNWGQGTLVTVSSGSASAPTLFPLVSCENSPSDTSSVAVGCLAQDFLPDSITFSWKYKNNSDISSTRGFPSVLRGGKYAATSQVLLPSKDVMQGTDEHVVCKVQHPNGNKEKNVPLP

SEQ ID NO: 85 - protein, 219 aa, synthetic construct
  REGION 1..219: note = Synthetic polypeptide representing artificial human antibody VH chain
EVQLVESGGGLVQPGGSLRLSCAASGFPPRSFAMSWVRQAPGKGLEWVSSISGLGNSIYYAESVKGRFITSRDNSKSTVFLLMNSLRAEDTAVYYCAKSAFGGVPDGFDIWGQGTMVTVSSASTKGPSVFPLAPCSRSTSESTAALGCLVKDYFPEPVTVSWNSGALTSGVHTFPAVLQSSGLYSLSSVVTVPSSSLGTQTYICNVDHKPSNTKVDKTV

SEQ ID NO: 86 - protein, 212 aa, synthetic construct
  REGION 1..212: note = Synthetic polypeptide representing artificial human antibody VH chain
PVQLVESGGGVVQPGRSLRLSCAASGFTFSNYGMHWVRQAPGKGLEWVAVISDDGNDKDNADSVKGRFTISRDNSKNTLYLRMNSLRREDTAVYYCARDGFDYWGQGTLVTVSSASTKGPSVFPLAPSSKSTSGGTAALGCLVKDYFPEPVTVSWNSGALTSGVHTFPAVLQSSGLYSLSSVVTVPSSSLGTQTYICNVNHKPSNTKVDKNV

SEQ ID NO: 87 - protein, 120 aa, synthetic construct
  REGION 1..120: note = Synthetic polypeptide representing artificial human antibody VH chain
EVQLVESGGVVVQPGGSLRLSCAASGFTFDDYTMHWVRQAPGKGLEWVSLISWDGGSTYYADSVKGRFTISRDNSKNSLYLQMNSLRTEDTALYYCAKAGYSFTTAPDYWGQGTLVTVSS

SEQ ID NO: 88 - protein, 219 aa, synthetic construct
  REGION 1..219: note = Synthetic polypeptide representing artificial human antibody VH chain
PVQLVQSGAEVKKPGASVKVSCKASGDTFPNYVISWVRQAPGQGLEWVGCINTNNGKTNYVQKLQGRVILTTDTSTNTANMELRSLRFDDTAVYYCARERGQVRSYGMDVWGQGTAVTVSSASTKGPSVFPLAPCSRSTSESTAALGCLVKDYFPEPVTVSWNSGALTSGVHTFPAVLQSSGLYSLSSVVTVPSSSLGTKTYTCNVDHKPSNTKVDKRV

SEQ ID NO: 89 - protein, 228 aa, synthetic construct
  REGION 1..228: note = Synthetic polypeptide representing artificial human antibody VH chain
EVQLVESGGGLVQPGRSLRLSCAASGFTFDDYAMHWVRQPPGRGLEWVSGIDWSGKTTEYAQSVKGRFTISRDNAKNSLYLQMNSLRVEDTALYFCVKIGGDGTAYAWTFRHFDSWGQGTRVTVSSASPTSPKVFPLSLCSTQPDGNVVIACLVQGFFPQEPLSVTWSESGQGVTARNFPPSQDASGDLYTTSSQLTLPATQCLAGKSVTCHVKHYTNPSQDVTVPCP

SEQ ID NO: 90 - protein, 218 aa, synthetic construct
  REGION 1..218: note = Synthetic polypeptide representing artificial human antibody VH chain
EVQLLESGGGLVQPGGSLRLSCAASGFTFSSYAMSWVRQAPGKGLEWVSAISGSGGSTYYADSVKGRFTISRDNSKNTLYLQMNSLRAEDTAVYYCARGLGGDWNYLAYWGQGTLVTVSSASTKGPSVFPLAPCSRSTSGGTAALGCLVKDYFPEPVTVSWNSGALTSGVHTFPAVLQSSGLYSLSSVVTVPSSSLGTQTYTCNVNHKPSNTKVDKRV

SEQ ID NO: 91 - protein, 226 aa, synthetic construct
  REGION 1..226: note = Synthetic polypeptide representing artificial human antibody VH chain
QVQLVESGGGVVQPGRSLRLSCAASGFTFSNYDMHWVRQAPGKGLEWVTVVSYDGTNKYYAESVQGRFTISRDNSKNTLYLQMNSLRTEDTAVYYCAKEGGWGNTVTTSYYYYGMDVWGQGTTVTVSSASTKGPSVFPLAPSSKSTSGGTAALGCLVKDYFPEPVTVSWNSGALTSGVHTFPAVLQSSGLYSLSSVVTVPSSSLGTQTYICNVNHKPSNTKVDKRV

SEQ ID NO: 92 - protein, 219 aa, synthetic construct
  REGION 1..219: note = Synthetic polypeptide representing artificial human antibody VH chain
EVQLVESGGGLVRPGGSLRLSCVGSGFTFSPYSINWVRQAPGKGLEWVSSITSTSSYLDYADSVKGRFTISRDNAKNSVYLQMNSLRVEDTAVYYCTRDGGYFATGEFDYWGQGTMVTVSSASTKGPSVFPLAPSSKSTSGGTAALGCLVKDYFPEPVTVSWNSGALTSGVHTFPAVLQSSGLYSLSSVVTVPSSSLGTQTYICNVNHKPSNTKVDKRA

SEQ ID NO: 93 - protein, 222 aa, synthetic construct
  REGION 1..222: note = Synthetic polypeptide representing artificial human antibody VH chain
PVQLQESGPGLVKPSQTLSLTCTVSGGSITSGSYFWSWIRQPAGEGLEWIGRIYTSGSTNYNPSLKSRVTISADTSKNHFSLELSSVTAADTAMYFCARERFGQGALDYWGQGTLVTVSSASPTSPKVFPLSLDSTPQDGNVVVACLVQGFFPQEPLSVTWSESGQNVTARNFPPSQDASGDLYTTSSQLTLPATQCPDGKSVTCHVKHYTNSSQDVTVPCP

SEQ ID NO: 94 - protein, 221 aa, synthetic construct
  REGION 1..221: note = Synthetic polypeptide representing artificial human antibody VH chain
QLHLQESGPGLVKPSETLSLTCTVSGGSVSSSSYYWGWVRQPPGKGLEWIGHVYYSGRTYYNPSLKSRATISLDTSKNQFSLKLSSLTATDTAVYYCATIVAAYSYGFEFDPWGQGILVIVSSASTKGPSVFPLAPSSKSTSGGTAALGCLVKDYFPEPVTVSWNSGALTSGVHTFPAVLQSSGLYSLSSVVTVPSSSLGTQTYICNVNHKPSNTKVDKRA

SEQ ID NO: 95 - protein, 226 aa, synthetic construct; identical to SEQ ID NO: 91
  REGION 1..226: note = Synthetic polypeptide representing artificial human antibody VH chain

SEQ ID NO: 96 - protein, 121 aa, synthetic construct
  REGION 1..121: note = Synthetic polypeptide representing artificial human antibody VH chain
VQLVQSGAEVRKPGESLTISCKTSGYAFIGNWIGWVRQRPGKGLEWIGMIYPVDSDTRYSPSFQGQVTISVDKSIRTAYLQWNSLRASDTATYYCARQGFEALVIRGFDYWGQGTVVTVSS

SEQ ID NO: 97 - protein, 222 aa, synthetic construct
  REGION 1..222: note = Synthetic polypeptide representing artificial human antibody VH chain
EGQLLESGGGLVQPGGSLRLSCEASGFTFSFSSYAMSWVRQAPGRGLEWVSVTGGSGYTKYYADSVKGRFTVSRDNSKNTLYLQMNSLRAEDTALYYCARRSTSSPSFSTLDVWGRGATVIVSSASTKGPSVFPLAPSSKSTSGGTAALGCLVKDYFPEPVTVSWNSGALTSGVHTFPAVLQSSGLYSLSSVVTVPSSSLGTQTYICNVNHKPSNTKVDKSE

SEQ ID NO: 98 - protein, 215 aa, synthetic construct
  REGION 1..215: note = Synthetic polypeptide representing artificial human antibody VH chain
VVQLVESGGGLVQPGGSLRLSCAASGFTFNNYEMNWVRQAPGKGLEWVSYISSSGSTIYYADSVKGRFTISRDNAKNSLYLQMNSLRAEDTAVYYCARQMVTTRGYWGQGTLVTVSSASTKGPSVFPLAPSSKSTSGGTAALGCLVKDYFPEPVTVSWNSGALTSGVHTFPAVLQSSGLYSLSSVVTVPSSSLGTQTYICNVNHKPSNTKVDKNV

SEQ ID NO: 99 - protein, 221 aa, synthetic construct
  REGION 1..221: note = Synthetic polypeptide representing artificial human antibody VH chain
EVQLVESGGGLVQPGGSLRLSCAASGFTFSSNWMSWVRQAPGKGLEWVANIKEDGSEKYYVDSVKGRFTIFRDNAKNSLYLQMNSLRAEDTAVYYCARVPSRYGRSRGAFDIWGQGTMVTVSSASTKGPSVFPLAPSSKSTSGGTAALGCLVKDYFPEPVTVSWNSGALTSGVHTFPAVLQSSGLYSLSSVVTVPSSSLGTQTYICNVNHKPSNTKVDKRV

SEQ ID NO: 100 - protein, 218 aa, synthetic construct
  REGION 1..218: note = Synthetic polypeptide representing artificial human antibody VH chain
QVQLQESGPGLVKPSQTLSLTCTVSGGSISSGGYYWSWIRQHPGKGLEWIGYIYYSGSTYYNPSLKSLVTISVDTSKNQFSLKLSSVTAADTAVYYCARNLYRLGWFDPWGQGTLVTVSSASTKGPSVFPLAPSSKSTSGGTAALGCLVKDYFPEPVTVSWNSGALTSGVHTFPAVLQSSGLYSLSSVVTVPSSSLGTQTYICNVNHKPSNTKVDKKV

SEQ ID NO: 101 - protein, 218 aa, synthetic construct
  REGION 1..218: note = Synthetic polypeptide representing artificial human antibody VH chain
QVQLVESGGGVVQPGRSLRLSCAASGFTFSSYGMHWVRQAPGKGLEWVAIISYDGSNKYYADSVKGRFTISRDKSKNTLYLQMNSLRAEDTAVYYCAKSKGNYRDAMDVWGQGTTVTVSSASTKGPSVFPLAPSSKSTSGGTAALGCLVKDYFPEPVTVSWNSGALTSGVHTFPAVLQSSGLYSLSSVVTVPSSSLGTQTYICNVNHKPSNTKVDKRV

SEQ ID NO: 102 - protein, 219 aa, synthetic construct
  REGION 1..219: note = Synthetic polypeptide representing artificial human antibody VH chain
QVLLVESGGGLVKPGGSLRLSCAASGFTFSDYYMSWIRQAPGKGLEWVSYIGSSTTAIYYADSVKGRFTISRDNARNSLYLQMNSLRAEDTAVYYCATSYTVTTFYGMDVWGQGTTVTVSSASTKGPSVFPLAPSSKSTSGGTAALGCLVKDYFPEPVTVSWNSGALTSGVHTFPAVLQSSGLYSLSSVVTVPSSSLGTQTYICNVNHKPSNTKVDKRV

SEQ ID NO: 103 - protein, 218 aa, synthetic construct
  REGION 1..218: note = Synthetic polypeptide representing artificial human antibody VH chain
QVQLQESGPGLVKPSQTLSLTCAVSGGSISSGGYPWSWIRQPPGKGLEWIGYISYSGSTDYNPSLKSRVTISLDTSSNQFSLNLSSLTAADTAVYYCARGAAFYYGMDVWGQGTTVTVSSASTKGPSVFPLAPSSKSTSGGTAALGCLVKDYFPEPVTVSWNSGALTSGVHTFPAVLQSSGLYSLSSVVTVPSSSLGTQTYICNVNHKPSNTKVDKRV

SEQ ID NO: 104 - protein, 219 aa, synthetic construct
  REGION 1..219: note = Synthetic polypeptide representing artificial human antibody VH chain
QVQLQESGPGLVKPSETLSLTCTVSGGSISIYYWSWIRQPPGKGLEWIGYIYYSGSTNYNPSLKSRVTISVDTSKNQFSLKLRSVTAADTAVYYCARDTYGDPRGDYFDYWGQGTLVTVSSASTKGPSVFPLAPSSKSTSGGTAALGCLVKDYFPEPVTVSWNSGALTSGVHTFPAVLQSSGLYSLSSVVTVPSSSLGTQTYICNVNHKPSNTKVDKKV

SEQ ID NO: 105 - protein, 123 aa, synthetic construct
  REGION 1..123: note = Synthetic polypeptide representing artificial human antibody VH chain
QVQLQESGPGLVKPSETLSLTCTVANSSISSYYWSWVRQPPGKALEWIGYISYSGSTNYNPSLKSRVTMSLDTPKSQFSLNLSSVTGADTAIYYCARLWGSGDWWPSLYFDSWGQGTLVTVSS

SEQ ID NO: 106 - protein, 218 aa, synthetic construct
  REGION 1..218: note = Synthetic polypeptide representing artificial human antibody VH chain
VVQLVESGGGLVQPGGSLRLSCAASGFTFNSYWMSWVRQAPGKGLEWVANIKQDGSEKYYVDSVKGRFTISRDNAKNSLYLQMNSLRAEDTAVYYCARIRRIAATSFDYWGQGTLVTVSSASTKGPSVFPLAPSSKSTSGGTAALGCLVKDYFPEPVTVSWNSGALTSGVHTFPAVLQSSGLYSLSSVVTVPSSSLGTQTYICNVNHKPSNTKVDKNV

SEQ ID NO: 107 - protein, 225 aa, synthetic construct
  REGION 1..225: note = Synthetic polypeptide representing artificial human antibody VH chain
EVQLVESGGGLVQPGRSLRLSCAASGFTFDDYAMHWVRQAPGKGLEWVSGISWNSGSIGYADSVKGRFTISRDNAKNSLYLQMNSLRAEDTALYYCAKIARRPPSFYDYMDVWGKGTTVTVSSASPTSPKVFPLSLCSTQPDGNVVIACLVQGFFPQEPLSVTWSESGQGVTARNFPPSQDASGDLYTTSSQLTLPATQCLAGKSVTCHVKHYTNPSQDVTVPCP

SEQ ID NO: 108 - protein, 225 aa, synthetic construct
  REGION 1..225: note = Synthetic polypeptide representing artificial human antibody VH chain
EVQLVQSGAEVKKPGESLKISCQGSGYRFNAYWIGWVRQIPGKGLEWMGIIYPGDSDTKYSPSFQGQVTISADKSISTAYLQWNGLEASDTAVYYCARSTSSSTSDFHYMDVWGKGTTVTISSASPTSPKVFPLSLCSTQPDGNVVIACLVQGFFPQEPLSVTWSESGQGVTARNFPPSQDASGDLYTTSSQLTLPATQCLAGKSVTCHVKHYTNPSQDVTVPCP

SEQ ID NO: 109 - protein, 218 aa, synthetic construct
  REGION 1..218: note = Synthetic polypeptide representing artificial human antibody VH chain
HVQLLQSGPGLVKPSQTLSLTCAISGDSVSSTSGAWNWIRQSPSRGLEWLGRTYYRSQWMNDYAESVRSRITINPDTSKNQFSLQLKSVTPEDTAVYYCTRGWAFTSSDWGQGTQVTVSSASTKGPSVFPLAPCSRSTSESTAALGCLVKDYFPEPVTVSWNSGALTSGVHTFPAVLQSSGLYSLSSVVTVPSSNFGTQTYTCNVDHKPSNTKVDKTV

SEQ ID NO: 110 - protein, 222 aa, synthetic construct
  REGION 1..222: note = Synthetic polypeptide representing artificial human antibody VH chain
HVHLQQSGPGLVTPSQTLSLTCAISGDSVSSNSAAWNWIRQSPSRGLEWLGRTYYRSKWYNDYAVSVKSRITFKADTSKNQFSLQLDSVTPDDTAVYYCAGGWALGYWGQGTLVTVSSGSASAPTLFPLVSCENSPSDTSSVAVGCLAQDFLPDSITFSWKYKNNSDISSTRGFPSVLRGGKYAATSQVLLPSKEVMQGTDEHVVCKVQHPNGNKEKNVPLP

SEQ ID NO: 111 - protein, 116 aa, synthetic construct
  REGION 1..116: note = Synthetic polypeptide representing artificial human antibody VH chain
PVQLQESGPGLVKPSETLSLTCTVSGGSISSYYWSWIRQPPGKGLEWIGYLFYSGSTNYNPSLKSRVTISVDTSKNQFSLKLGSVTAADTAVYYCARHRIFGLDVWGQGTTVTVSS

SEQ ID NO: 112 - protein, 230 aa, synthetic construct
  REGION 1..230: note = Synthetic polypeptide representing artificial human antibody VH chain
CAEVQLVQSGAEVKKPGESLKISCKGSGYSFTSYWIGWVRQMPGKGLEWMGIIYPGDSDTRYSPSFQGQVTISADKSISTAYLQWSSLKASDTAMYYCARRGPTDTWSGEVGYYFDYWGQGTLVTVSSASPTSPKVFPLSLCSTQPDGNVVIACLVQGFFPQEPLSVTWSESGQGVTARNFPPSQDASGDLYTTSSQLTLPATQCLAGKSVTCHVKHYTNPSQDVTVPCP

SEQ ID NO: 113 - protein, 223 aa, synthetic construct
  REGION 1..223: note = Synthetic polypeptide representing artificial human antibody VH chain
QCQVQLVESGGGVVQPGRSLRLSCAASGFTFSSYGMHWVRQAPGKGLEWVAVIWYDGSNKYYADSVKGRFTISRDNSKNTLYLQMNSLRAEDTAVYYCARDGKTLGYGGNSVDYWGQGTLVTVSSASTKGPSVFPLAPSSKSTSGGTAALGCLVKDYFPEPVTVSWNSGALTSGVHTFPAVLQSSGLYSLSSVVTVPSSSLGTQTYICNVNHKPSNTKVDKKV

SEQ ID NO: 114 - protein, 224 aa, synthetic construct
  REGION 1..224: note = Synthetic polypeptide representing artificial human antibody VH chain
EVQLVESGGGLVKPGGSLRLSCAVSGFTFRSYSMNWVRQAPGKGLEWVSSISSSSRYVDYADSVKGRFTISRDNAKNLLYLQMNFLRVEDTAVYYCARTETKWEDRGLWDYWGQGTLVTVSSASPTSPKVFPLSLCSTQPDGNVVIACLVQGFFPQEPLSVTWSESGQGVTARNFPPSQDASGDLYTTSSQLTLPATQCLAGKSVTCHVKHYTNPSQDVTVPCP

SEQ ID NO: 115 - protein, 215 aa, synthetic construct
  REGION 1..215: note = Synthetic polypeptide representing artificial human antibody VH chain
QVQLVQSGAEVKKPGSSVKVSCKTSGGTFSSYTISWVRQAPGQGPEWMGRIIPILNITNYAQKFQGRVTITADKSTSTTYMEMGSLRSEDTAVYFCARSFYGSGLQWGQGTLVTVSSASTKGPSVFPLAPSSKSTSGGTAALGCLVKDYFPEPVTVSWNSGALTSGVHTFPAVLQSSGLYSLSSVVTVPSSSLGTQTYICNVNHKPSNTKVDKRV

SEQ ID NO: 116 - protein, 218 aa, synthetic construct
  REGION 1..218: note = Synthetic polypeptide representing artificial human antibody VH chain
GVDLVESGGGLVKPGGSLRLSCAASGFSFSRYNINWVRQAPGKGLEWVSSISSTSNYIYYADSVKGRFTISRDNAKNSLYLQMNSLRAEDTAVYYCARAMGGYTYYLDDWGQGTLVTVSSASTKGPSVFPLAPSSKSTSGGTAALGCLVKDYFPEPVTVSWNSGALTSGVHTFPAVLQSSGLYSLSSVVTVPSSSLGTQTYICNVNHKPSNTKVDKKV

SEQ ID NO: 117 - protein, 222 aa, synthetic construct
  REGION 1..222: note = Synthetic polypeptide representing artificial human antibody VH chain
QVQLVESGGGVVQPGRSLRLSCAASGFTFTNYAIHWVRQAPDKGLEWVSVISYDGSDEYYADSVKGRFTISRDNSKNTVYLQMSSLRAEDTAVYRCARAGKDGYNFFYYGMDVWGQGTTVSVSSPSTKGPSVFPLAPSSKSTSGGTAALGCLVKDYFPEPVTVSWNSGALTSGVHTFPAVLQSSGLYSLSSVVTVPSSSLGTQTYICNVNHKPSNTKVDKKL

SEQ ID NO: 118 - protein, 220 aa, synthetic construct
  REGION 1..220: note = Synthetic polypeptide representing artificial human antibody VH chain
QVQLVESGGGVVQPGRSLRLSCAASGFSFSSFGMHWVRQAPGKGLEWVAVIWHDGSHKSHADSVKGRFTISRDNSKNTVYLQMNSLGAEDTAVYYCARGIMTTAISYYFDYWGQGTLVTVSSASTKGPSVFPLAPSSKSTSGGTAALGCLVKDYFPEPVTVSWNSGALTSGVHTFPAVLQSSGLYSLSSVVTVPSSSLGTQTYICNVNHKPSNTKVDKRV

SEQ ID NO: 119 - protein, 125 aa, synthetic construct
  REGION 1..125: note = Synthetic polypeptide representing artificial human antibody VH chain
EVQLLQSGGGLVQPGGSLRLSCAASGFTFSSYAVTWVRQAPGKGLEWVSTISGDGRSTYFADSVKGRFAIYRDNSKNTLSLLLNSLRAEDTAVYYCAKGERDLTDYGDPEYFQHWGQGTLVTVSS

SEQ ID NO: 120 - protein, 125 aa, synthetic construct
  REGION 1..125: note = Synthetic polypeptide representing artificial human antibody VH chain
QVQVVESGGGVVQPGRSLRLSCVASGFTFSSHGMHWVRQAPGKGLEWVAVISDDGKNKYYGDSVQGRFVISRDNSKNTIYLQMYDLRAEDTAVYYCAKDLRYCSARSSCFGIDFWGQGTLVTVSS

SEQ ID NO: 121 - protein, 214 aa, synthetic construct
  REGION 1..214: note = Synthetic polypeptide representing artificial human antibody VH chain
VVQLVESGGGLVQPGGSLRLSCAASGFSFSTYWMSWVRQAPGKGLEWVANIKQDGSEKHYVDSVKGRFTISRDNAKNSLYLQMNSLRAEDTAMYYCARRAYSFDYWGQGTLVTVSSASTKGPSVFPLAPSSKSTSGGTAALGCLVKDYFPEPVTVSWNSGALTSGVHTFPAVLQSSGLYSLSSVVTVPSSSLGTQTYICNVNHKPSNTKVDKSE

SEQ ID NO: 122 - protein, 223 aa, synthetic construct
  REGION 1..223: note = Synthetic polypeptide representing artificial human antibody VH chain
EVQLVESGGGLVQPGGSLRLSCAASGFTFNNYWMHWVRQAPGKGLVWVSRISSDGSTTASADSVKGRFTISRDNAKNTLFLQMNSLRAEDTAVYYCAREGAPDDYGDSGTAFDIWGQGTTVTVSSASTKGPSVFPLAPSSKSTSGGTAALGCLVKDYFPEPVTVSWNSGALTSGVHTFPAVLQSSGLYSLSSVVTVPSSSLGTQTYICNVNHKPSNTKVDKKV

SEQ ID NO: 123 - protein, 219 aa, synthetic construct
  REGION 1..219: note = Synthetic polypeptide representing artificial human antibody VH chain
EVHLVQSGGGLVKPGGSLRLSCAASGFTFSHGWMSWVRQAPGKGLEWVARIRSKTDGGTTDYAAPVNGRFTISRDISIETLYLQMDSLKTEDTAVYYCTTDHPYGDYSDNWGQGVLVTVSSASTKGPSVFPLAPSSKSTSGGTAALGCLVKDYFPEPVTVSWNSGALTSGVHTFPAVLQSSGLYSLSSVVTVPSSSLGTQTYICNVNHKPSNTKVDKSE

SEQ ID NO: 124 - protein, 218 aa, synthetic construct
  REGION 1..218: note = Synthetic polypeptide representing artificial human antibody VH chain
QVQLQESGPGLVKPSETLSLTCTVSGGSIRNDYWSWIRQSPGKGLEWIGYISDIGDTNYNPSFKSRISISLDTSKNQFSLKLNSVTAADTAVYYCAKELLGGFDYWGQGTLVAVSTASPTSPKVFPLSLCSTQPDGNVVIACLVQGFFPQEPLSVTWSESGQGVTARNFPPSQDASGDLYTTSSQLTLPATQCLAGKSVTCHVKHYTNPSQDVTVPCP

SEQ ID NO: 125 - protein, 218 aa, synthetic construct
  REGION 1..218: note = Synthetic polypeptide representing artificial human antibody VH chain
QVQLVQSGAEVKKPGSSVKVSCKASGGTFSSYAISWVRQAPGQGLEWMGGIIPIFGTANYAQKFQGRVTITADESTSTAYMELSSLRSEDTAVYYCARVFGSAAGAFDIWGQGTMVTVSSASTKGPSVFPLAPSSKSTSGGTAALGCLVKDYFPEPVTVSWNSGALTSGVHTFPAVLQSSGLYSLSSVVTVPSSSLGTQTYICNVNHKPSNTKVDKSE

SEQ ID NO: 126 - protein, 218 aa, synthetic construct
  REGION 1..218: note = Synthetic polypeptide representing artificial human antibody VH chain
PLQLHESGPGLVKPSETLSLTCSVSGGSISSSNYFWGWIRQSPGMGLEWIGSIYFSGKTHYNPSLKSRVTISVDTSKNHFSLKLSSVTAADTAVFFCARHDWRLYAFDYWGLGTLVTVSSASTKGPSVFPLAPSSKSTSGGTAALGCLVKDYFPEPVTVSWNSGALTSGVHTFPAVLQSSGLYSLSSVVTVPSSSLGTQTYICNVNHKPSNTKVDKSE

SEQ ID NO: 127 - protein, 220 aa, synthetic construct
  REGION 1..220: note = Synthetic polypeptide representing artificial human antibody VH chain
VVQLVESGGGLVQPGGSLRLSCAGSGFTFSDYWMHWVRQAPGKGLVWVSTINRDGSYTNHADSVKGRFTISRDNARSTLFLQMSSLRVEDTAVYYCAGGETSPDYWGQGTLVTVSSGSASAPTLFPLVSCENSPSDTSSVAVGCLAQDFLPDSITFSWKYKNNSDISSTRGFPSVLRGGKYAATSQVLLPSKDVMQGTDEHVVCKVQHPNGNKEKNVPLP

SEQ ID NO: 128 - protein, 221 aa, synthetic construct
  REGION 1..221: note = Synthetic polypeptide representing artificial human antibody VH chain
QLQLQESGPGLVKPSETLSLTCTVSDVSIISSFYYWGWIRQPPGKGLEWIGSVYYSGSTSYNPSLKSRVTISADTSKAHFSLNLRSVTAADTAVYYCVSRGPLGGAAAGPDYWGQGALVIVSSASTKGPSVFPLAPSSKSTSGGTAALGCLVKDYFPEPVTVSWNSGALTSGVHTFPAVLQSSGLYSLSSVVTVPSSSLGTQTYICNVNHKPSNTKVDKRV

SEQ ID NO: 129 - protein, 216 aa, synthetic construct
  REGION 1..216: note = Synthetic polypeptide representing artificial human antibody VH chain
QVRLQESGPGLVKPSQTLSLTCTVSGASVSSGSYYWAWVRQSAAKGLEWIGRVSPSGTNNYNTALKSRVTISLDTARNQFSLTVTSVTAEDTAIYYCARDVRGWFVPWGQGSLVTVSSASTKGPSVFPLAPSSKSTSGGTAALGCLVKDYFPEPVTVSWNSGALTSGVHTFPAVLQSSGLYSLSSVVTVPSSSLGTQTYICNVNHKPSNTKVDKSE

SEQ ID NO: 130 - protein, 224 aa, synthetic construct
  REGION 1..224: note = Synthetic polypeptide representing artificial human antibody VH chain
PVQLVQSGAVVKKPGSSVKVSCKASGGTFSGYGINWVRQAPGQGLEWMGRIIPIVGEANYAQKFQGRVTINADKSTSTATLEVRSLRSEDTAVYYCVRDRNIVSVPGAIPYGMDVWGQGTTVTVSSASTKGPSVFPLAPCSRSTSGGTAALGCLVKDYFPEPVTVSWNSGALTSGVHTFPAVLQSSGLYSLSSVVTVPSSSLGTQTYTCNVNHKPSNTKVDKRV

SEQ ID NO: 131 - protein, 116 aa, synthetic construct
  REGION 1..116: note = Synthetic polypeptide representing artificial human antibody VH chain
VVQLVESGGGLVQPGGSLRLSCAASGFTFSSYWMHWVRQAPGKGLVWVSRINSDGSSTSYADSVKGRFTISRDNAKNTLYLQMNSLRAEDTAVYYCARGSDTLDYWGQGTLVTVSS

SEQ ID NO: 132 - protein, 218 aa, synthetic construct
  REGION 1..218: note = Synthetic polypeptide representing artificial human antibody VH chain
QVQLQESGPGLLKPSQTLSLSCTVSGGSISSGDYYWSWIRQPPGKGLEWIGYIYYNGSTYYSSSLRSRLTISVDTSKNQFSLKLSSVTAADTAAYYCARVGLTFALFDPWGQGTLVTVSSASTKGPSVFPLAPCSRSTSESTAALGCLVKDYFPEPVTVSWNSGALTSGVHTFPAVLQSSGLYSLSSVVTVPSSSLGTKTYTCNVDHKPSNTKVDKRV

SEQ ID NO: 133 - protein, 222 aa, synthetic construct
  REGION 1..222: note = Synthetic polypeptide representing artificial human antibody VH chain
VVQLLESGGGLVQPGGSLRLSCAASGFTFSSYAINWVRQAPGKGLEWVSAISGSGGSTYYADSVKGRFTISRDNSKNTLYLQMNSLRAEDTAVYYCANSAGIQLWSSDNWFDPWGQGTLVTVSSASTKGPSVFPLAPSSKSTSGGTAALGCLVKDYFPEPVTVSWNSGALTSGVHTFPAVLQSSGLYSLSSVVTVPSSSLGTQTYICNVNHKPSNTKVDKSE

SEQ ID NO: 134 - protein, 219 aa, synthetic construct
  REGION 1..219: note = Synthetic polypeptide representing artificial human antibody VH chain
EVQLLESGGGLVQPGGSLRLSCAASGFTFSSYAMSWVRQAPGKGLEWVSAISASGRTTYYADSFKGRFTISRDNSKNTLYLQMSRLRGDDAAVYYCAKEGIELMILWGQGTLVTVSSTSPTSPKVFPLSLCSTQPDGNVVIACLVQGFFPQEPLSVTWSESGQGVTARNFPPSQDASGDLYTTSSQLTLPATQCLAGKSVTCHVKHYTNPSQDVTVPCP

SEQ ID NO: 135 - protein, 223 aa, synthetic construct
  REGION 1..223: note = Synthetic polypeptide representing artificial human antibody VH chain
VVQLVESGGALVQPGGSLRLSCAASGFTLSSYAMYWVRQAPGKGLEYVSAITANGGSTYYANSVKGRFTVSRDNSKKTVYLQLGSLRAEDTAVYYCARGITLTRGVSFDYWGQGTLVTVSPASPTSPKVFPLSLCSTQPDGNVVIACLVQGFFPQEPLSVTWSESGQGVTARNFPPSQDASGDLYTTSSQLTLPATQCLAGKSVTCHVKHYTNPSQDVTVPCP

SEQ ID NO: 136 - protein, 117 aa, synthetic construct
  REGION 1..117: note = Synthetic polypeptide representing artificial human antibody VH chain
PLQLQESGSGLVKPSQTLSLTCAVSGGSISSGGYSWSWIRQPPGKGLEWLGYIYHRGTSYYNPSLKSRVTISLDMSKNQLSLKLTSVTAADTAVYYCARDGGAFDIWGQGTLVTVSS

SEQ ID NO: 137 - protein, 221 aa, synthetic construct
  REGION 1..221: note = Synthetic polypeptide representing artificial human antibody VH chain
QVHLVESGGGVVQPGRSLRLSCAASGFTFSNSAMHWVRQAPGKGLDWVSVISFDGSNQYYADSVKGRFTISRDNSKNTLFLQMNSLRAEDTAVYYCARDRLFTAINSGYFDYWGQGTLVTVSSASTKGPSVFPLAPSSKSTSGGTAALGCLVKDYFPEPVTVSWNSGALTSGVHTFPAVLQSSGLYSLSSVVTVPSSSLGTQTYICNVNHKPSNTKVDKSE

SEQ ID NO: 138 - protein, 118 aa, synthetic construct
  REGION 1..118: note = Synthetic polypeptide representing artificial human antibody VH chain
QVQLVQPGGEVKKPGASVKISCKASGYTFTSHYMHWVRQAPGQGLEWMGMIDPSGGSRTYAQKFQGRVTMTRDTSTSTVYMELSSLRSDDTAVYYCAREGSYYGIGYWGQGTLVTVSS

SEQ ID NO: 139 - protein, 121 aa, synthetic construct
  REGION 1..121: note = Synthetic polypeptide representing artificial human antibody VH chain
EVQLVESGGVVVQPGGSLRLSCAASGFTFSAYWMHWVRQAPGKGLVWVSRINTDGSSTSYADSVKGRFTISRDNAKNSLYLQMNSLRAEDTAVYYCARDTDSGWLDSFDYWGQGTLVTVSS

SEQ ID NO: 140 - protein, 128 aa, synthetic construct
  REGION 1..128: note = Synthetic polypeptide representing artificial human antibody VH chain
QGQLVQSGAEVKKAGASVKVSCKVSGYSLTEISMHWVRQAPGKGLEWVGGFDPEGGETIYAQKFQGRVSMTWDTSIDLAYMELRSLSSDDTALYYCATDQGCDDGSCYVGHYYGMDVWGQGTKVTVSS

SEQ ID NO: 141 - protein, 216 aa, synthetic construct
  REGION 1..216: note = Synthetic polypeptide representing artificial human antibody VH chain
PLQLQESGPGLVKPSETLSLTCSVSGGSIRSSAPFWGWIRQPPGKGLEWIGNIYYNGDTSYSPSLENRVTLFVDTSKNQFSLNLTSVTAADTAVYYCGRIMTPSIDLWGQGKLVTVSSASPTSPKVFPLAPSSKSTSGGTAALGCLVKDYFPEPVTVSWNSGALTSGVHTFPAVLQSSGLYSLSSVVTVPSSSLGTQTYICNVNHKPSNTKVDKNE

SEQ ID NO: 142 - protein, 218 aa, synthetic construct
  REGION 1..218: note = Synthetic polypeptide representing artificial human antibody VH chain
QVQLVQSGAEVKKPGASVKVSCKASGYIFTTYVISWVRQAPGQGLEWMGWISAYTGNTNYPQKFQGRVTMTTDTATSTAYMELKSLRSDDTAVYYCAREGRGGGDFFDYWGQGTLVTVSSASTKGPSVFPLAPSSKSTSGGTAALGCLVKDYFPEPVTVSWNSGALTSGVHTFPAVLQSSGLYSLSSVVTVPSSSLGTQTYICNVNHKPSNTKVDKNV

SEQ ID NO: 143 - protein, 219 aa, synthetic construct
  REGION 1..219: note = Synthetic polypeptide representing artificial human antibody VH chain
VQLVESGGGLVQPGRSLRLSCAASGFTFDDYAMHWVRQAPGKGLEWVSGIIWNSGTTGYADSVKGRFTISRDNAKKSLYLQMNSLRTEDTALYYCAKDGDSLGDFSTFDIWGHGTMVTVSSASTKGPSVFPLAPSSKSTSGGTAALGCLVKDYFPEPVTVSWNSGALTSGVHTFPAVLQSSGLYSLSSVVTVPSSSLGTQTYICNVNHKPSNTKVDKNV

SEQ ID NO: 144 - protein, 217 aa, synthetic construct
  REGION 1..217: note = Synthetic polypeptide representing artificial human antibody VH chain
EVQLVESGGGLVQTGGSLRLSCSASGFTFNNYWMHWVRQAPGKGLLWLSRINTDGSRGHYDDSVQGRFTISRDNAKQTVYLQMDGLRAEDTAVYFCARDGYDFRAFDHWGQGVLVTVSSASTKGPSVFPLAPSSKSTSGGTAALGCLVKDYFPEPVTVSWNSGALTSGVHTFPAVLQSSGLYSLSSVVTVPSSSLGTQTYICNVNHKPSNTKVDKKV

SEQ ID NO: 145 - protein, 224 aa, synthetic construct
  REGION 1..224: note = Synthetic polypeptide representing artificial human antibody VH chain
QVQLLESGPGVVKPSETLSLTCSVSGDSVSSFYWTWIRQPPGKGPEWIGNIYHSGSTNFNPSLKSRVTISLDMSKNQFSLHLKSVTAADTAVYYCARARGGGFCSNMDCPAMFDYWGRGTLVTVSAASTKGPSVFPLAPSSKSTSGGTAALGCLVKDYFPEPVTVSWNSGALTSGVHTFPAVLQSSGLYSLSSVVTVPSSSLGTQTYICNVNHKPSNTKVDKSE

SEQ ID NO: 146 - protein, 121 aa, synthetic construct
  REGION 1..121: note = Synthetic polypeptide representing artificial human antibody VH chain
EVQLVESGGGSVKPGGSLRLSCVAGGYNFNDDRMSSMNWVRQAPGKGLEWVGRIKSKSDGGSTNYAAPVQGRFTISRDDSKNTLYLQMNSLKIEDTAVYYCTTIHDYGDHWGQGTLVTVSS

SEQ ID NO: 147 - protein, 214 aa, synthetic construct
  REGION 1..214: note = Synthetic polypeptide representing artificial human antibody VH chain
EVQLVESGGALVQPGGSLRISCAASGFTVSTNYMSWVRQAPGKELEWISVIYSGGTTYYAAPVKGRFTISRDDSKNTLYLQMNSLRVEDTAVYHCARGLLRSLDVWGQGTTVTVSSASTKGPSVFPLAPCSRSTSESTAALGCLVKDYFPEPVTVSWNSGALTSGVHTFPAVLQSSGLYSLSSVVTVTSSNFGTQTYTCNVDHKPSNTKVDKTV

SEQ ID NO: 148 - protein, 225 aa, synthetic construct
  REGION 1..225: note = Synthetic polypeptide representing artificial human antibody VH chain
EVHLVESGGGFVQPGGSLRLSCAASGFTFSDHYMDWVRQAPGKGLEWVGRIKNRANSYNTEYAASVRGRFTISRDDSNNSLFLQMNSLTAEDTAVYYCARVKLGASSRVFDVWGQGTMVTVSSASPTSPKVFPLSLCSTQPDGNVVIACLVQGFFPQEPLSVTWSESGQGVTARNFPPSQDASGDLYTTSSQLTLPATQCLAGKSVTCHVKHYTNPSQDVTVPCP

SEQ ID NO: 149 - protein, 120 aa, synthetic construct
  REGION 1..120: note = Synthetic polypeptide representing artificial human antibody VH chain
QVQLVESGGGVVQPGRSLRLSCAASGFTFRDYGMHWVRQAPGQGLQWVAVISFDGSDKFYADSVKGRFSISRDNSRDTVYLQMNRLRPEDTAVYYCATTVTPKVTSFASWGQGSLVTVSA

SEQ ID NO: 150 - protein, 221 aa, synthetic construct
  REGION 1..221: note = Synthetic polypeptide representing artificial human antibody VH chain
CEVQLVESGGGLVKPGGSLRLSCAASGFDIRSYTIHWVRQAPGKGLEWVSSITAGGSFINYADSVKGRFTISRDNAQNSLFLQVDRLRAEDTALYFCAREQSPLYFGPSLDVWGQGTSVIVSLASTKGPSVFPLAPSSKSTSGGTAALGCLVKDYFPEPVTVSWNSGALTSGVHTFPAVLQSSGLYSLSSVVTVPSSSLGTQTYICNVNHKPSNTKVDKSE

SEQ ID NO: 151 - protein, 217 aa, synthetic construct
  REGION 1..217: note = Synthetic polypeptide representing artificial human antibody VH chain
QVQLVQSGAEVKNPGASVKVSCKASGYTFTDYYIHWVRQAPGQGLEWMGWINPNSGGTNHAQKFQGRVTMTRDMSINTAYMEVSGLRSDDTAIYYCAREPYSSYAMDVWGQGTTVTVSSASTKGPSVFPLAPSSKSTSGGTAALGCLVKDYFPEPVTVSWNSGALTSGVHTFPAVLQSSGLYSLSSVVTVPSSSLGTQTYICNVNHKPSNTKVDKKV

SEQ ID NO: 152 - protein, 218 aa, synthetic construct
  REGION 1..218: note = Synthetic polypeptide representing artificial human antibody VH chain
CEVQLLESGGGLVQPGGSLRLSCAASGFTFSNYAMSWVRQAPGKGLKWVSSISYSGGSTYYADSVKGRVTISRDNSKNTLYLQMNSLRAEDTAVYYCAKDGSEMLLCDYWGQGTLVTVSSASTKGPSVFPLAPSSKSTSGGTAALGCLVKDYFPEPVTVSWNSGALTSGVHTFPAVLQSSGLYSLSSVVTVPSSSLGTQTYICNVNHKPSNTKVDKIV

SEQ ID NO: 153 - protein, 217 aa, synthetic construct
  REGION 1..217: note = Synthetic polypeptide representing artificial human antibody VH chain
CDVHLVQSGGGLVKPGGSLRLSCAASGFNFNSYTMTWVRQAPGKGLQWVSSISSSGGDINYADSLKGRFSISRDNAKNSVFLQLNSLRAEDTAVYYCARDTRWRGLDSWGQGILVTVSSASTKGPSVFPLAPCSRSTSESTAALGCLVKDYFPEPVTVSWNSGALTSGVHTFPAVLQSSGLYSLSSVVTVTSSNFGTQTYTCNVDHKPSNTKVDKTV

SEQ ID NO: 154 - protein, 222 aa, synthetic construct
  REGION 1..222: note = Synthetic polypeptide representing artificial human antibody VH chain
GVQLVESGGDLVQPGRSLRLSCAASGFTFDDYAMHWVRQSPGKGLEWVSSISWNSGDIAYGDSVKGRFTVSRDNAKNSLHLQLNSLRVEDSALYYCAKDLLAVPGLLDDWGQGTLVTVSTASPTSPKVFPLSLCSTQPDGNVVIACLVQGFFPQEPLSVTWSESGQGVTARNFPPSQDASGDLYTTSSQLTLPATQCLAGKSVTCHVKHYTNPSQDVTVPCP

SEQ ID NO: 155 - protein, 213 aa, synthetic construct
  REGION 1..213: note = Synthetic polypeptide representing artificial human antibody VH chain
QVLLVQSGAEVKKPGSSVKVSCKASGGTFSSYGISWVRQAPGQGLEWMGGMANYAQKFQGRVTISGDESTSTAYMELSNLTSEDTAVYYCASRGGSSRRYGMGVWGQGTTVTVSSASTKGPSVFPLAPSSKSTSGGTAALGCLVKDYFPEPVTVSWNSGALTSGVHTFPAVLQSSGLYSLSSVVTVPSSSLGTQTYICNVNHKPSNTKVDKRV

SEQ ID NO: 156 - protein, 222 aa, synthetic construct
  REGION 1..222: note = Synthetic polypeptide representing artificial human antibody VH chain
CEVQLLESGGALVQPGGSLRLSCAVSGLTFNRFAMTWVRQAPGKGLEWVSHIGGSGGYTYYADSVKGRFTISRDNSKNTLYLQMNSLRAEDTAVYHCVKLKGIGAMWTYAMDVWGQGTTVTVSSASTKGPSVFPLAPCSRSTSESTAALGCLVKDYFPEPVTVSWNSGALTSGVHTFPAVLQSSGLYSLSSVVTVTSSNFGTQTYTCNVDHKPSNTKVDKTV

SEQ ID NO: 157 - protein, 227 aa, synthetic construct
  REGION 1..227: note = Synthetic polypeptide representing artificial human antibody VH chain
QLQLQESGPGLVKPSDTLSLTCTVSGYSISTAYYWGWIRQPPGKGLEWIGSIFHSGSAYYNPSLDGRVSLSVDTSKNQFSLRLKSVTAADTAVYYCARDQGYGDYDYPRDWIEPWGQGTLVTVSSASPTSPKVFPLSLDSTPQDGNVVVACLVQGFFPQEPLSVTWSESGQNVTARNFPPSQDASGDLYTTSSQLTLPATQCPDGKSVTCHVKHYTNPSQDVTVPCP

SEQ ID NO: 158 - protein, 123 aa, synthetic construct
  REGION 1..123: note = Synthetic polypeptide representing artificial human antibody VH chain
QVQLVQSGAEVKKPGSSVKVSCKASGGNVRSYSISWVRQAPGQGLEWMGGMITTFGKADYALKFRDRVTITADRSTNTVYMELSSLTSQDTAVYYCASVRDLVSGTTYYYHYWGQGTLISVSS

SEQ ID NO: 159 - protein, 214 aa, synthetic construct
  REGION 1..214: note = Synthetic polypeptide representing artificial human antibody VH chain
QVQLQESGPGLVKPSETLSLTCTVSGDSISSNYWSWIRQPPGKGLEWIGYIYYSGSTNYNPSLKSRVTISVDTSKNQFSVKLSSVTAADTAVYYCARYGDYSFDPWGQGTLVTVSSASTKGPSVFPLAPSSKSTSGGTAALGCLVKDYFPEPVTVSWNSGALTSGVHTFPAVLQSSGLYSLSSVVTVPSSSLGTQTYICNVNHKPSNTKVDKSE

SEQ ID NO: 160 - protein, 218 aa, synthetic construct
  REGION 1..218: note = Synthetic polypeptide representing artificial human antibody VH chain
QVQLVQSGAEVKKPGASVKVSCKAFGYRFSNFGISWVRQAPGQGLEWMGWISAYNGNTNYAQKLQGRVTMTTDTSTSTAYMELRSLRSDDTAVYYCARVVDTVLADFDYWGQGTLVTVSSASTKGPSVFPLAPSSKSTSGGTAALGCLVKDYFPEPVTVSWNSGALTSGVHTFPAVLQSSGLYSLSSVVTVPSSSLGTQTYICNVNHKPSNTKVDKSE

SEQ ID NO: 161 - protein, 219 aa, synthetic construct
  REGION 1..219: note = Synthetic polypeptide representing artificial human antibody VH chain
QVHLVQSGSEFKKPGASVKISCKTSGYTFTNYAMNWVRQAPGQGLEWVGWINTVTGIPGYAQGFTGRFIISLDTSGRTSYLQINSLQAEDTAVYYCARSGGFGWSRDLDYWGQGTLVTVSSASTKGPSVFPLAPCSRSTSGGTAALGCLVKDYFPEPVTVSWNSGALTSGVHTFPAVLQSSGLYSLSSVVTVPSSSLGTQTYTCNVNHKPSNTKVDKRV

SEQ ID NO: 162 - protein, 223 aa, synthetic construct
  REGION 1..223: note = Synthetic polypeptide representing artificial human antibody VH chain
PQLQLQESGPGLVKPSETLSLTCSVSGDSISSSSYFWGWIRQPPGKGLEWIGSVYYSGSTYYKPSLKSRLTISVDTSKKQFSLNLSSMTAADTAVYYCARHGFWSGPIPDAFDIWGQGTMVTVSSASTKGPSVFPLAPSSKSTSGGTAALGCLVKDYFPEPVTVSWNSGALTSGVHTFPAVLQSSGLYSLSSVVTVPSSSLGTQTYICNVNHKPSNTKVDKNE

SEQ ID NO: 163 - protein, 217 aa, synthetic construct
  REGION 1..217: note = Synthetic polypeptide representing artificial human antibody VH chain
QVQLVESGGGVVHPGRSLRLSCAASGFTFSNYGMHWLRQAPGKGLEWVAIIAYDGSQKKYADSVKGRFTISRDNSKDTMYLQMNNLRTEDTAVYYCAHEDYGSGNGNYWGQGTLVTVSSASTKGPSVFPLAPSSKSTSGGTAALGCLVKDYFPEPVTVSWNSGALTSGVHTFPAVLQSSGLYSLSSVVTVPSSSLGTQTYICNVNHKPSNTKVDKSE

SEQ ID NO: 164 - protein, 220 aa, synthetic construct
  REGION 1..220: note = Synthetic polypeptide representing artificial human antibody VH chain
PVHLVQSGAEVRKPGSSVKVSCMASGGSFNTYAVNWVRQAPGQGLEWMGGIIPVFGTTNYAPRFQGRVTITADESTSTVYMELTSLTSEDTAVYYCARDRDSGYERNCLDPWGQGTLVTVSSASTKGPSVFPLAPCSRSTSESTAALGCLVKDYFPEPVTVSWNSGALTSGVHTFPAVLQSSGLYSLSSVVTVPSSSLGTKTYTCNVDHKPSNTKVDKRV

SEQ ID NO: 165 - protein, 231 aa, synthetic construct
  REGION 1..231: note = Synthetic polypeptide representing artificial human antibody VH chain
QVQLMQSGAEVKQPGASVKVSCKASGDTFTSFAIHWVRQVSGQGLEWMGWINAGNGDTKYSQKIQGRITITRDTSARTAYMELSSLRSEDTAVYYCARGAPYGSRIYYDYDSYHGMDVWGQGTTVTVSSASPTSPKVFPLSLCSTQPDGNVVIACLVQGFFPQEPLSVTWSESGQGVTARNFPPSQDASGDLYTTSSQLTLPATQCLAGKSVTCHVKHYTNPSQDVTVPCP

SEQ ID NO: 166 - protein, 222 aa, synthetic construct
  REGION 1..222: note = Synthetic polypeptide representing artificial human antibody VH chain
QVHLQESGPGLVKPSQTLSLTCTVSGDSISNGDYCWNWIRQRPGKGLEWIGYIYHSGSTYENPSLRSRVTMSVDTSKNQFSMELTSVTAADTAVYYCARGKFDWFPRVSSFDYWGRGTLVTVSSASTKGPSVFPLAPSSKSTSGGTAALGCLVKDYFPEPVTVSWNSGALTSGVHTFPAVLQSSGLYSLSSVVTVPSSSLGTQTYICNVNHKPSNTKVDKSE

SEQ ID NO: 167 - protein, 222 aa, synthetic construct
  REGION 1..222: note = Synthetic polypeptide representing artificial human antibody VH chain
VVQLVESGGDWVQPGGSLRLSCAASGFTFRSYWMSWVRQAPGKGLEWVASVEGYRSEEYYVDSVKGRFTISRDNAKNSVYLQMNSLRAEDTAVYYCAAAYYIDTSGFDYWGQGTQVTVSSASPTSPKVFPLSLCSTQPDGNVVIACLVQGFFPQEPLSVTWSESGQGVTARNFPPSQDASGDLYTTSSQLTLPATQCLAGKSVTCHVKHYTNPSQDVTVPCP

SEQ ID NO: 168 - protein, 224 aa, synthetic construct
  REGION 1..224: note = Synthetic polypeptide representing artificial human antibody VH chain
CEVQLLESGGKLVQPGGSLRLSCAASGFTYDSYVMNWVRQAPGKGLEWVSGISASGGGTYYADSVKGRFTISRDNSKNTLYLEMNSLRADDTAVYYCAKGRTYSNNWLFHWYFDLWGRGTLVTVSSASTKGPSVFPLAPSSKSTSGGTAALGCLVKDYFPEPVTVSWNSGALTSGVHTFPAVLQSSGLYSLSSVVTVPSSSLGTQTYICNVNHKPSNTKVDKNE

SEQ ID NO: 169 - protein, 219 aa, synthetic construct
  REGION 1..219: note = Synthetic polypeptide representing artificial human antibody VH chain
PVQLQESGPGLVKPSETLSLTCTVSSGSVSSGSHYWSWIRQPPGKGLEWIGYIYYSGTSNYNPSLKGRVAISVDTSKNQFSLKLSSVTAADTAIYYCARVFSTIFHGVDPWGQGTLVTVSSASTKGPSVFPLAPSSKSTSGGTAALGCLVKDYFPEPVTVSWNSGALTSGVHTFPAVLQSSGLYSLSSVVTVPSSSLGTQTYICNVNHKPSNTKVDKKV

SEQ ID NO: 170 - protein, 224 aa, synthetic construct
  REGION 1..224: note = Synthetic polypeptide representing artificial human antibody VH chain
QVQLVQSGAEVKKPGASVKVSCRASGYSFTGYYIHWVRQAPGQGLEWMGWINPKTGDTHYAQNFQGWVTMTRDTSISTAYMELTILRSDDTAVYYCARHLSSGEYHYGLDVWGQGTTVTASSASPTSPKVFPLSLCSTQPDGNVVIACLVQGFFPQEPLSVTWSESGQGVTARNFPPSQDASGDLYTTSSQLTLPATQCLAGKSVTCHVKHYTNPSQDVTVPCP

SEQ ID NO: 171 - protein, 217 aa, synthetic construct
  REGION 1..217: note = Synthetic polypeptide representing artificial human antibody VH chain
VQLVESGGGVVQPGRSLRLSCAAPGFTFSNYGMHWVRQAPGKGLEWVAVISYDGSNKYYADSVKGRFTISRDNSKNTLYLQMNSLRAEDTAVYYCAKGKGIVGATFDYWGQGTLVTVSSASTKGPSVFPLAPSSKSTSGGTAALGCLVKDYFPEPVTVSWNSGALTSGVHTFPAVLQSSGLYSLSSVVTVPSSSLGTQTYICNVNHKPSNTKVDKNV

SEQ ID NO: 172 - protein, 224 aa, synthetic construct
  REGION 1..224: note = Synthetic polypeptide representing artificial human antibody VH chain
CEVQLVESGGGLVKPGGSLRLSCAASGFTFSNYNMNWVRQAPGKGLEWVSSISSSSSYIYYADSVKGRFTISRDNAKNSLYLQMNSLRAEDTAVYYCARDALDFDWLLSAGGFDYWGQGTLVTVSSASTKGPSVFPLAPSSKSTSGGTAALGCLVKDYFPEPVTVSWNSGALTSGVHTFPAVLQSSGLYSLSSVVTVPSSSLGTQTYICNVNHKPSNTKVDKKV

SEQ ID NO: 173 - protein, 217 aa, synthetic construct
  REGION 1..217: note = Synthetic polypeptide representing artificial human antibody VH chain
PLQLQESGPGLVKPSETLSLTCTVSGGSISSSSYYWGWIRQPPGKGLEWIGSIYYSGSTYYNPSLKSRVTISVDTSKNQFSLKLSSVTAADTAVYSCARLLVGGAFDIWGQGTMVTVSSASTKGPSVFPLAPSSKSTSGGTAALGCLVKDYFPEPVTVSWNSGALTSGVHTFPAVLQSSGLYSLSSVVTVPSSSLGTQTYICNVNHKPSNTKVDKSE

SEQ ID NO: 174 - protein, 226 aa, synthetic construct
  REGION 1..226: note = Synthetic polypeptide representing artificial human antibody VH chain
CEVQLVESGGGLVKPGGSLRLSCAASGFTFSNAWMNWVRQAPGKGLEWVGRIKSKTDGGTTDYAAPVKGRFTISRDDSKNTLYLQMNSLKTEDTAVYYCTPGSCSGGSCYSGDAFDIWGQGTMVTVSSASTKGPSVFPLAPSSKSTSGGTAALGCLVKDYFPEPVTVSWNSGALTSGVHTFPAVLQSSGLYSLSSMVTVPSSSLGTQTYICNVNHKPSNTKVDKSE

SEQ ID NO: 175 - protein, 220 aa, synthetic construct
  REGION 1..220: note = Synthetic polypeptide representing artificial human antibody VH chain
QVHLVQSGAEVKKPGASVKVSCKASGYTFTNYFIHWVRQAPGQGPEWMGVINPSFGSTTYAQKLQGRVTMTRETSTSTVYMELSSLRSEDTAVYYCARESLDSASYSTIAHWGQGTLVTVSSASTKGPSVFPLAPSSKSTSGGTAALGCLVKDYFPEPVTVSWNSGALTSGVHTFPAVLQSSGLYSLSSVVTVPSSSLGTQTYICNVNHKPSNTKVDKSE

SEQ ID NO: 176 - protein, 220 aa, synthetic construct
  REGION 1..220: note = Synthetic polypeptide representing artificial human antibody VH chain
QVQLVQSGAEVKKPGSSVKVSCKAPGGTFNNYGISWVRQAPGQGLEWMGGIMPMFGRTSETQKFQGRVTISADESTSTVYMEMSSLRFDDTAVYYCARDRGGNSWLDVFDMWGQGTMVTVSSASTKGPSVFPLAPCSRSTSESTAALGCLVKDYFPEPVTVSWNSGALTSGVHTFPAVLQSSGLYSLSSVVTVPSSNFGTQTYTCNVDHKPSNTKVDKTV

SEQ ID NO: 177 - protein, 224 aa, synthetic construct
  REGION 1..224: note = Synthetic polypeptide representing artificial human antibody VH chain
EVQLLESGGGLVHPGGSLRLSCVASGFTFSSYEMTWVRQAPGKGLEWISYISSTGTTTYHADSVRGRFTISRDNAKSSLFLQMNSLRVEDTALYYCARSPAAFGSESYFDSWGQGVLVTVSSASPTSPKVFPLSLCSTQPDGNVVIACLVQGFFPQEPLSVTWSESGQGVTARNFPPSQDASGDLYTTSSQLTLPATQCLAGKSVTCHVKHYTNPSQDVTVPCP

SEQ ID NO: 178 - protein, 222 aa, synthetic construct
  REGION 1..222: note = Synthetic polypeptide representing artificial human antibody VH chain
QVQLVESGGGVVQPGRSLRLSCAASGFTFTTYAVHWVRQAPGKGLEWVAVISNDGSNKNYADSVRGRFIISRDNSKNTLYLQMNSLRAEDTAVYYCAKDLLEDPYFGDLLFDYWGQGTLVTVSSASTKGPSVFPLAPSSKSTSGGTAALGCLVKDYFPEPVTVSWNSGALTSGVHTFPAVLQSSGLYSLSSVVTVPSSSLGTQTYICNVNHKPSNTKVDKNV

SEQ ID NO: 179 - protein, 223 aa, synthetic construct
  REGION 1..223: note = Synthetic polypeptide representing artificial human antibody VH chain
EVQLVQSGAEVKKSGESLKISCKGSGYTFTSYWIAWVRQMPGKGLEWMGIIYPGDSDTRYSPSFQGQVTISADKSISTAYLQWSSLKASDTAMYYCVRTPAVGTDPDYWGQGTLVTVSSGSASAPTLFPLVSCENSPSDTSSVAVGCLAQDFLPDSITFSWKYKNNSDISSTRGFPSVLRGGKYAATSQVLLPSKDVMQGTDEHVVCKVQHPNGNKEKNVPLP

SEQ ID NO: 180 - protein, 217 aa, synthetic construct
  REGION 1..217: note = Synthetic polypeptide representing artificial human antibody VH chain
EVQLMESGGGLVQPGGSLRLSCAASGLTFSIYSMNWVRQAPGKGLEWVSYISRGSSVIYHADSVKGRFTISRDDGKNLLYLQMNSLRDDDTAMYYCSSGGSTSMVGRYWGQGSLVTVSSASTKGPSVFPLAPSSKSTSGGTAALGCLVKDYFPEPVTVSWNSGALTSGVHTFPAVLQSSGLYSLSSVVTVPSSSLGTQTYICNVNHKPSNTKVDKRV

SEQ ID NO: 181 - protein, 220 aa, synthetic construct
  REGION 1..220: note = Synthetic polypeptide representing artificial human antibody VH chain
QVTLKESGPVLVKPTETLTLTCTVSGFSLSNARMGVSWIRQPPGKALEWLGHIFSNDEKSYSTSLKSRLTISKDTSKSQVVLTLTNMDPVDTATYYCARMTPFKFGLCPDYWGQGTLVTVSSASTKGPSVFPLAPSSKSTSGGTAALGCLVKDYFPEPVTVSWNSGALTSGVHTFPAVLQSSGLYSLSSVVTVPSSSLGTQTYICNVNHKPSNTKVDKKV

SEQ ID NO: 182 - protein, 219 aa, synthetic construct
  REGION 1..219: note = Synthetic polypeptide representing artificial human antibody VH chain
QVQLVQSGAEVKKPGASVKVSCKASGYTFTVYYMHWVRQAPGQGLEWMGRINPNSGGTNYAQKFQGRVTMTRDTSISTAYMELSRLTSDDTAVYYCARVVVVGTDYGMDVWGQGTTVTVSSASTKGPSVFPLAPSSKSTSGGTAALGCLVKDYFPEPVTVSWNSGALTSGVHTFPAVLQSSGLYSLSSVVTVPSSSLGTQTYICNVNHKPSNTKVDKSE

SEQ ID NO: 183 - protein, 219 aa, synthetic construct
  REGION 1..219: note = Synthetic polypeptide representing artificial human antibody VH chain
QVQLVQSGAEVKKPGASVKVSCKASGYTFTSYGISWVRQAPGQGLEWMGWISAYNGNTNYAQKLQGRVTMTTDTSTSTAYMELRSLTSDDTAVYYCARDQGLERANWFDPWGQGTLVTVSSASTKGPSVFPLAPSSKSTSGGTAALGCLVKDYFPEPVTVSWNSGALTSGVHTFPAVLQSSGLYSLSSVVTVPSSSLGTQTYICNVNHKPSNTKVDKKV

SEQ ID NO: 184 - protein, 217 aa, synthetic construct
  REGION 1..217: note = Synthetic polypeptide representing artificial human antibody VH chain
QVHLQESGPGLVKPSRTLSLTCAISGDSVSSTSAAWNWIRQSPSGGLEWLGRTFYRTKWYSESTGSLKSRIIVNPDTSKNQFSLQLNSVTPEDTAVYYCARGVRHFDYWGQGTLVTVSSASTKGPSVFPLAPSSKSTSGGTAALGCLVKDYFPEPVTVSWNSGALTSGVHTFPAVLQSSGLYSLSSVVTVPSSSLGTQTYICNVNHKPSNTKVDKKV

SEQ ID NO: 185 - protein, 217 aa, synthetic construct
  REGION 1..217: note = Synthetic polypeptide representing artificial human antibody VH chain
QVQLQESGPGLVKPSGTLSLTCAVSGGSISSSNCWSWVRQPPGKGLEWLGEICHSGSTSYNPSLKSRVTISVDKSKNQFSLKLRSVTAADTAVYYCARESPLTVVFDYWGQGTLVTVSSASTKGPSVFPLAPSSKSTSGGTAALGCLVKDYFPEPVTVSWNSGALTSGVHTFPAVLQSSGLYSLSSVVTVPSSSLGTQTYICNVNHKPSNTKVDKKV

SEQ ID NO: 186 - protein, 215 aa, synthetic construct
  REGION 1..215: note = Synthetic polypeptide representing artificial human antibody VH chain
EVQLVESGGGLVQPGGSLRLSCAASGFTVSSNYMSWVRQAPGKGLEWVSVIYSGGSTYYADSVKGRFTISRDNSKNTLSLQMNSLRAEDTAVYYCARESSAAGYDYWGQGTLVTVSSASTKGPSVFPLAPSSKSTSGGTAALGCLVKDYFPEPVTVSWNSGALTSGVHTFPAVLQSSGLYSLSSVVTVPSSSLGTQTYICNVNHKPSNTKVDKSV

SEQ ID NO: 187 - protein, 221 aa, synthetic construct
  REGION 1..221: note = Synthetic polypeptide representing artificial human antibody VH chain
QVQLVQSGAEVRKPGASVKVSCKASGYTFTTYYIHWVRQAPGQGLEWMGLINPNGGTTNYAQKFQGRLSMTTDTSTNTVYMELSSLRSEDTAVYYCARKLMSGIVSRGWFDPWGQGTLVTVSSASTKGPSVFPLAPSSKSTSGGTAALGCLVKDYFPEPVTVSWNSGALTSGVHTFPAVLQSSGLYSLSSVVTVPSSSLGTQTYICNVNHKPSNTKVDKSV

SEQ ID NO: 188 - protein, 220 aa, synthetic construct
  REGION 1..220: note = Synthetic polypeptide representing artificial human antibody VH chain
PVQLQESGPGLVKPSETLSLTCTVSGGSVSSGSYYWSWIRQPPGKGLEWIGYIYYSGSTNYNPSLKSRVTISVDTSKNQFSLKLSSVTAADTAVYYCARDRGDYVTHWFDPWGQGTLVTVSSASTKGPSVFPLAPSSKSTSGGTAALGCLVKDYFPEPVTVSWNSGALTSGVHTFPAVLQSSGLYSLSSVVTVPSSSLGTQTYICNVNHKPSNTKVDKSE

SEQ ID NO: 189 - protein, 219 aa, synthetic construct
  REGION 1..219: note = Synthetic polypeptide representing artificial human antibody VH chain
QLQLQESGPGLVKPWETLSLSCTVSGGSISSSFFYWGWIRQPPGKGLQWIGNIHYTGSTYYNPSLKSRITMSVDTSKNQFSLKLSSVTAADTAVYYCARHRVGDSPGLHYWGQGTLVTVSSASTKGPSVFPLAPSSKSTSGGTAALGCLVKDYFPEPVTVSWNSGALTSGVHTFPAVLQSSGLYSLSSVVTVPSSSLGTQTYICNVNHKPSNTKVDKSE

SEQ ID NO: 190 - protein, 217 aa, synthetic construct
  REGION 1..217: note = Synthetic polypeptide representing artificial human antibody VH chain
QVQLVESGGGVVQPGRSLRLSCAASGFTFSSYAMHWVRQAPGKGLEWVAVISYDGSNKYYADSVKGRFTISRDNSKNTLYLQMNSLRAEDTAVYYCASPIAVAAPFAYWGQGTLVTVSSASTKGPSVFPLAPSSKSTSGGTAALGCLVKDYFPEPVTVSWNSGALTSGVHTFPAVLQSSGLYSLSSVVTVPSSSLGTQTYICNVNHKPSNTKVDKSE

SEQ ID NO: 191 - protein, 229 aa, synthetic construct
  REGION 1..229: note = Synthetic polypeptide representing artificial human antibody VH chain
CEVQLLESGGGLVQPGGSLRLSCAASGFTFSTYVMSWVRQAPGKGLEWVSLISGSGGSTHYADSVRGRFTISRDNSKNTLYLQMNSLRAEDTAVYYCVKDYLAVGGTYYDYFDYWGQGTLVTVSSGSASAPTLFPLVSCENSPSDTSSVAVGCLAQDFLPDSITFSWKYKNNSDISSTRGFPSVLRGGKYAATSQVLLPSKDVMQGTDEHVVCKVQHPNGNKEKNVPLP

SEQ ID NO: 192 - protein, 217 aa, synthetic construct
  REGION 1..217: note = Synthetic polypeptide representing artificial human antibody VH chain
PLQLQESGPGLVKPSETLSLTCTVSGGSISSSSYYWGWIRQSPGKGLEWMGSIYYSGSTYYNPSLKSRVTISVDTSKNQFSLNLSSVTAADTAVYYCARHDYRNYFDYWGQGTLVTVSSASTKGPSVFPLAPSSKSTSGGTAALGCLVKDYFPEPVTVSWNSGALTSGVHTFPAVLQSSGLYSLSSVVTVPSSSLGTQTYICNVNHKPSNTKVDKSE

SEQ ID NO: 193 - protein, 220 aa, synthetic construct
  REGION 1..220: note = Synthetic polypeptide representing artificial human antibody VH chain
QVQLVQSGAEVKKPGASVKVSCQASGYTFTGYYIHWVRQAPGQGLEWMGWINPNSGGTNYAQKFQGRVTMTRDTSISTAHMELGRLRSDDTAVYYCATPPSRYGGNYYADYWGQGTLVTVSSASTKGPSVFPLAPSSKSTSGGTAALGCLVKDYFPEPVTVSWNSGALTSGVHTFPAVLQSSGLYSLSSVVTVPSSSLGTQTYICNVNHKPSNTKVDKKV

SEQ ID NO: 194 - protein, 216 aa, synthetic construct
  REGION 1..216: note = Synthetic polypeptide representing artificial human antibody VH chain
PVQLVQSGAEVKKPGDSLSISCEVSGYSFTSYWIGWVRQMPGKGLEWMAIINPADSDTRYSPSFRGQVTISVDKSINTAYLQWTSLQASDTAMYYCARQGPTVAIDFWGQGTLVTVSSASTKGPSVFPLAPSSKSTSGGTAALGCLVKDYFPEPVTVSWNSGALTSGVHTFPAVLQSSGLYSLSSVVTVPSSSLGTQTYICNVNHKPSNTKVDKSE

SEQ ID NO: 195 - protein, 116 aa, synthetic construct
  REGION 1..116: note = Synthetic polypeptide representing artificial human antibody VH chain
EVQLVQSGAEVKKPGESLKISCKGSGYSFTTYWIAWVRQMPGKGLEWMGIIYPADSDTRYSPSFQGQVTMSADQSINTAYLQWSSLKASDTAMYYCARRGREFDYWGQGTLLTVSS

SEQ ID NO: 196 - protein, 223 aa, synthetic construct
  REGION 1..223: note = Synthetic polypeptide representing artificial human antibody VH chain
CEVQLLESGGGLVQPGGSLRLSCAASGFTFRIYAMSWVRQAPGKGLEWVSAISYSGNTTYYADSVKGRFTISRDNSKNTLYLQINNLRAEDTAIYYCAIQEKRELQLRRELDNYWGQGTLVTVSSASTKGPSVFPLAPSSKSTSGGTAALGCLVKDYFPEPVTVSWNSGALTSGVHTFPAVLQSSGLYSLSSVVTVPSSSLGTQTYICNVNHKPSNTKVDKKV

SEQ ID NO: 197 - protein, 117 aa, synthetic construct
  REGION 1..117: note = Synthetic polypeptide representing artificial human antibody VH chain
QVQLVQSGAEVKKPGASVKVSCKASGYTFTSYYMYWVRQAPGQGLEWMGIINPGGGSTSYAQKFQGRVTMTRDTSTSTVYMELSSLRSEDTAVYYCARVFRYGMDVWGQGTTVTVSS

SEQ ID NO: 198 - protein, 117 aa, synthetic construct
  REGION 1..117: note = Synthetic polypeptide representing artificial human antibody VH chain
QVQVVESGGGLVKPGGSLRLSCAVSGLDFRDYYVNWIRQAPGKGLEWLSYITSPGGHTSYSDSVKGRFTISRDNAKNSVYLQMDSLTVEDTAVYFCAIKEGYGLSDWGQGTLVTVSS

SEQ ID NO: 199 - protein, 223 aa, synthetic construct
  REGION 1..223: note = Synthetic polypeptide representing artificial human antibody VH chain
VVQLLESGGGLVQPGGSLRLSCAASGFTFISYAMSWVRQAPGKGLEWVSDISGSGGSTYYADSVKGRLTISRDNSNNTLYLQMNSLRAEDTAVYYCAKEDGYTQNFDYWGQGTLVTVSSGSASAPTLFPLVSCENSPSDTSSVAVGCLAQDFLPDSITFSWKYKNNSDISSTRGFPSVLRGGKYAATSQVLLPSKDVMQGTDEHVVCKVQHPNGNKEKNVPLP

SEQ ID NO: 200 - protein, 121 aa, synthetic construct
  REGION 1..121: note = Synthetic polypeptide representing artificial human antibody VH chain
QVQLVQSGAEVKKPGASVKISCKASGYTFTSHAIHWVRQAPGQTFEWLGWINPVNGVTKYSQTFQDRVTIVRDKSATTTYMDLSGLTFEDTAMYYCARVLDFYGSSVLDYWGQGTLVTVSS

SEQ ID NO: 201 - protein, 115 aa, synthetic construct
  REGION 1..115: note = Synthetic polypeptide representing artificial human antibody VH chain
HVQLVQSGSELKKPGASVKLSCKASGYTFTNYAMNWVRQAPGQGLEWMGWINTNTGNPTYAQGFTGRFVFSLDTSVSTAYLQISSLKAEDTALYYCARDRPGDYWGQGTLVTVSS

SEQ ID NO: 202 - protein, 216 aa, synthetic construct
  REGION 1..216: note = Synthetic polypeptide representing artificial human antibody VH chain
QVQLVESGGGVVQPGRSLRLSCAASGFTFSNFAMHWVRQAPGKGLEWVVVISSDGSNKNYADSVKGRFTISRDNSKNTLYLQMNSLRAEDTAVYYCARDLGVGSTTYWGQGTLVTVSSASTKGPSVFPLAPSSKSTSGGTAALGCLVKDYFPEPVTVSWNSGALTSGVHTFPAVLQSSGLYSLSSVVTVPSSSLGTQTYICNVNHKPSNTKVDKRV

SEQ ID NO: 203 - protein, 219 aa, synthetic construct
  REGION 1..219: note = Synthetic polypeptide representing artificial human antibody VH chain
GEQLLESGGGLVQPGGSLRLSCAASGFTFSHYAMTWVRQAPGKGLEWVSGVSGSGFTTYYADSVKGRFTISRDNAQNTLYLHMNSLRAEDTAIYYCVKDLEVSIGHNFDFWGQGTLVTVSSASTKGPSVFPLAPSSKSTSGGTAALGCLVKDYFPEPVTVSWNSGALTSGVHTFPAVLQSSGLYSLSSVVTVPSSSLGTQTYICNVNHKPSNTKVDKRV

SEQ ID NO: 204 - protein, 225 aa, synthetic construct
  REGION 1..225: note = Synthetic polypeptide representing artificial human antibody VH chain
EVQLVESGGGLVKPGGSLRLSCAASGFTFSSYSMNWVRQAPGKGLEWVSSISSSSSYIYYADSVKGRFTISRDNAKNSLYLQMNSLRAEDTAVYYCARDRGVVVVAATPYYYGMDVWGQGTTVTVSSASTKGPSVFPLAPSSKSTSGGTAALGCLVKDYFPEPVTVSWNSGALTSGVHTFPAVLQSSGLYSLSSVVTVPSSSLGTQTYICNVNHKPSNTKVDKKV

SEQ ID NO: 205 - protein, 223 aa, synthetic construct
  REGION 1..223: note = Synthetic polypeptide representing artificial human antibody VH chain
QITLKESGPTLVKPTQTLTLTCTFSGFSLSTNGVGVGWIRQPPGKALEWLALINWDDDKRYSPSLKSRLTITKDTSKNQVVLTMTNLDPVDTATYYCVHARDDYGDSAWSTGPVWGQGTLVTVSSASTKGPSVFPLAPSSKSTSGGTAALGCLVKDYFPEPVTVSWNSGALTSGVHTFPAVLQSSGLYSLSSVVTVPSSSLGTQTYICNVNHKPSNTKVDKRV

SEQ ID NO: 206 - protein, 223 aa, synthetic construct
  REGION 1..223: note = Synthetic polypeptide representing artificial human antibody VH chain
LITLKESGPTLVKPTQTLTLTCTVSGLSLSTSGVAVGWIRQPPGKALEWLALIYWDDDTRYSPSLKSRLSITKDTSKNQVVLTMRNVDPVDTATYYCGHRRLLRGVTTTVYFDPWGQGTLVTVSSASTKGPSVFPLAPSSKSTSGGTAALGCLVKDYFPEPVTVSWNSGALTSGVHTFPAVLQSSGLYSLSSVVTVPSSSLGTQTYICNVNHKPSNTKVDKRV

SEQ ID NO: 207 - protein, 223 aa, synthetic construct
  REGION 1..223: note = Synthetic polypeptide representing artificial human antibody VH chain
PVQLQESGPGLVNPSQTLSLTCTVSGGSISSGGYCWSWVRQHPGKGLEWIGCIYYIGTTYYMRSLKSRLIISIDTSKNQFSLKLTSVTAADSAVYYCARGGELLGGFGYSGMDVWGQGTTVTVSSASTKGPSVFPLAPCSRSTSESTAALGCLVKDYFPEPVTVSWNSGALTSGVHTFPAVLQSSGLYSLSSVVTVPSSSLGTKTYTCNVDHKPSNTKVDKRV

SEQ ID NO: 208 - protein, 224 aa, synthetic construct
  REGION 1..224: note = Synthetic polypeptide representing artificial human antibody VH chain
ELQLVESGGGLVQPGGSLRLSCAASGFTFSSYWMSWVRQAPGKGLEWVANINQDGGEKYYVDSVKGRFTISRDNAKNSLYLQMNSLRAEDTAVYYCAHYYYDSSGYYQNAEYFQYWGQGTLVTVSSASTKGPSVFPLAPSSKSTSGGTAALGCLVKDYFPEPVTVSWNSGALTSGVHTFPAVLQSSGLYSLSSVVTVPSSSLGTQTYICNVNHKPSNTKVDKKV

SEQ ID NO: 209 - protein, 226 aa, synthetic construct
  REGION 1..226: note = Synthetic polypeptide representing artificial human antibody VH chain
QVQLVQSGAEVKKPGSSVKVSCKASRGTFSNHAVSWVRQAPGQGLEWVGGIIPVFGPPNYAQKFRGRVTITADRSTNTAYMELNSLRSEDTAVYYCARTQWGTDVEATNPYYYFMDVWGKGTTVTVSSASTKGPSVFPLAPSSKSTSGGTAALGCLVKDYFPEPVTVSWNSGALTSGVHTFPAVLQSSGLYSLSSVVTVPSSSLGTQTYICNVNHKPSNTKVDKRV

SEQ ID NO: 210 - protein, 217 aa, synthetic construct
  REGION 1..217: note = Synthetic polypeptide representing artificial human antibody VH chain
QVQLVQSGTEMKRPGSSVKVSCKASGGTFNFYAINWVRQAPGQGLEWMGGIVPIFDTTTYAQRFQGRVTITADESTTTVHMELSSLRFDDTAVYYCARDQSGADRFDSWGQGTLVTVSSASTKGPSVFPLAPSSKSTSGGTAALGCLVKDYFPEPVTVSWNSGALTSGVHTFPAVLQSSGLYSLSSVVTVPSSSLGTQTYICNVNHKPSNTKVDKSE

SEQ ID NO: 211 - protein, 218 aa, synthetic construct
  REGION 1..218: note = Synthetic polypeptide representing artificial human antibody VH chain
QVQLVQSGAEVKKPGASVKISCQAFGYNFIDNAIHWVRQAPGQRPEWMGWINAGNGNTRYSQNFQGRVTITKVTSASTAYMEMSRLKSEDTAVYFCARSSKWTDWHFDYWGQGTLVTVSSASTKGPSVFPLAPSSKSTSGGTAALGCLVKDYFPEPVTVSWNSGALTSGVHTFPAVLQSSGLYSLSSVVTVPSSSLGTQTYICNVNHKPSNTKVDKSE

SEQ ID NO: 212 - protein, 219 aa, synthetic construct
  REGION 1..219: note = Synthetic polypeptide representing artificial human antibody VH chain
QIQLVQSGAEVKKPGASVKVSCKTSGYTFTHYGVAWVRQAPGQGPEWMGWISPYNGNIEYGQKFQGRVTMTTDTSTNTAYMELRSLRYDDTAVYYCARDLDEINSSWLDPWGQGTLIIVSPASTKGPSVFPLAPSSKSTSGGTAALGCLVKDYFPEPVTVSWNSGALTSGVHTFPAVLQSSGLYSLSSVVTVPSSSLGTQTYICNVNHKPSNTKVDKSE

SEQ ID NO: 213 - protein, 226 aa, synthetic construct
  REGION 1..226: note = Synthetic polypeptide representing artificial human antibody VH chain
VVQLLESGGGVVQPGGSLRLSCAASGFTFSNYAMNWVRQAPGKGLEWVTGISGPGESSYYADSVKGRFTVSRDNYRNTLYLQMNDLGAEDTATYFCAKRPTAGNSYGGYYFDHWGQGTLVTVSSASPTSPKVFPLSLCSTQPDGNVVIACLVQGFFPQEPLSVTWSESGQGVTARNFPPSQDASGDLYTTSSQLTLPATQCLAGKSVTCHVKHYTNPSQDVTVPCP

SEQ ID NO: 214 - protein, 224 aa, synthetic construct
  REGION 1..224: note = Synthetic polypeptide representing artificial human antibody VH chain
QVQLVQSGAEVKKPGASVKLSCKPSGYTFSSYYIHWLRQAPGQGLEWMGIINPSGGYTSSAQKFQGRVTMTRDTSTSTIYMELSSLRAEDTAVYYCARRGEVGTMVRVFRKPFDYWGQGTLVTVSSASTKGPSVFPLAPSSKSTSGGTAALGCLVKDYFPEPVTVSWNSGALTSGVHTFPAVLQSSGLYSLSSVVTVPSSSLGTQTYICNVNHKPSNTKVDKKV

SEQ ID NO: 215 - protein, 223 aa, synthetic construct
  REGION 1..223: note = Synthetic polypeptide representing artificial human antibody VH chain
PVQLVQSGAEVKKPGESLKISCQGSGYNFSRYWIGWVRQMPGKGLEWMGVVFPGDSDIRYSLSFQGHITIYADNSISTAYLQWSSLKASDTAIYYCATTSTMPMPTRGRDWFDPWGQGTLVTVSSASTKGPSVFPLAPSSKSTSGGTAALGCLVKDYFPEPVTVSWNSGALTSGVHTFPAVLQSSGLYSLSSVVTVPSSSLGTQTYICNVNHKPSNTKVDKRV

SEQ ID NO: 216 - protein, 216 aa, synthetic construct
  REGION 1..216: note = Synthetic polypeptide representing artificial human antibody VH chain
QVQLVESGGGVVQPGTSLTLSCEASGFTFNRYGMHWVRQAPGKGLEWVAVIWYDGTNKYYADSVRGRFTISRDNSKNTLYLQMNTLRGDDTAVYFCAGAHGDYGLDYWGQGTLVTVSSASTKGPSVFPLAPSSKSTSGGTAALGCLVKDYFPEPVTVSWNSGALTSGVHTFPAVLQSSGLYSLSSVVTVPSSSLGTQTYICNVNHKPSNTKVDKRE

SEQ ID NO: 217 - protein, 220 aa, synthetic construct
  REGION 1..220: note = Synthetic polypeptide representing artificial human antibody VH chain
EVQLVQSGAEVKKPGESLRISCKGSGYSFTSFWISWVRQMPGKGLEWMGRIDPSDSYTNYSPSFQGHVTISADKSISTAFLQWSSLKASDTAMYYCARHQQKYSPISPLDYWGQGTLVTVSSASTKGPSVFPLAPSSKSTSGGTAALGCLVKDYFPEPVTVSWNSGALTSGVHTFPAVLQSSGLYSLSSVVTVPSSSLGTQTYICNVNHKPSNTKVDKRV

SEQ ID NO: 218 - protein, 120 aa, synthetic construct
  REGION 1..120: note = Synthetic polypeptide representing artificial human antibody VH chain
EVQLVESGGGVIKPGGSLKLSCEGSGFTLDDYVMHWVRQAPGKGLEWISSISGDGTRTYYADSVKGRFTISRNNGKNSLYLQMDSLRREDTALYYCAKDARLAYYGMDVWGQGTTVTVSS

SEQ ID NO: 219 - protein, 121 aa, synthetic construct
  REGION 1..121: note = Synthetic polypeptide representing artificial human antibody VH chain
QLQLQESGPGLVKPSETLSLTCTVSGDSISSSGFFWAWIRQAPGKGLDWIGSTYHRTTTTYYNPSLKSRVTISVDTSKNQFSLTLNSLTAADTAVYYCARHSSGYSELAYWGQGTLVIVST

SEQ ID NO: 220 - protein, 223 aa, synthetic construct
  REGION 1..223: note = Synthetic polypeptide representing artificial human antibody VH chain
QEQLVQSGAEVKKPGSSVKVSCKVSGGPFKTYPINWVRQAPGQGLEWMGGITPNSGTPNYAQKFQGRVTITADESTTTVYMQLSSLRSEDTAVYYCARVHNWDFYYGMDVWGLGTTVTVSSASPTSPKVFPLSLCSTQPDGNVVIACLVQGFFPQEPLSVTWSESGQGVTARNFPPSQDASGDLYTTSSQLTLPATQCLAGKSVTCHVKHYTNPSQDVTVPCP

SEQ ID NO: 221 - protein, 226 aa, synthetic construct
  REGION 1..226: note = Synthetic polypeptide representing artificial human antibody VH chain
EVQVVESGGGLVQPGRSLRLSCTPSGFTFGDNAMGWFRQAPGKGLEWVGFIRSKAYGGTRDYAASVKGRFTISRDDSKSIAYLQMNSLKTEDTAVYYCTRERPPNCGSSCPETWGQGTLVTVSSASPTSPKVFPLSLCSTQPDGNVVIACLVQGFFPQEPLSVTWSESGQGVTARNFPPSQDASGDLYTTSSQLTLPATQCLAGKSVTCHVKHYTNPSQDVTVPCP

SEQ ID NO: 222 - protein, 119 aa, synthetic construct
  REGION 1..119: note = Synthetic polypeptide representing artificial human antibody VH chain
QVQLVQSGSEVKKPGASVRLACKTSGYTFSNYGVSWVRQGPGRGLEWLGWISGYNGRTHSADKFRDRVTLTTDTSTTTVYVDLKNLTSDDTAVYYCARVGTSHWYSDSWGQGTLVTVSS

SEQ ID NO: 223 - protein, 117 aa, synthetic construct
  REGION 1..117: note = Synthetic polypeptide representing artificial human antibody VH chain
EVQLVESGGGMVQPGESLRLSCAASGFDFTSYWMAWVRQAPGKGLEWVANMNADGSEKHYVDSVKGRFSISRDNAKKLLFLQMNSLTVDDTGVYYCARDEGRREGAWGQGTQVIVSA

SEQ ID NO: 224 - protein, 219 aa, synthetic construct
  REGION 1..219: note = Synthetic polypeptide representing artificial human antibody VH chain
CEVQLVESGGGLVQPGGSLRLSCAASGFTFSSYSMNWVRQAPGKGLEWVSYISSSSSTIYYADSVKGRFTISRDNAKNSLYLQMNSLRAEDTAVYYCARDIALGRGGMDVWGQGTTVTVSSGSASGPSVFPLAPSSKSTSGGTAALGCLVKDYFPEPVTVSWNSGALTSGVHTFPAVLQSSGLYSLSSVVTVPSSSLGTQTYICNVNHKPSNTKVDKNV

SEQ ID NO: 225 - protein, 120 aa, synthetic construct
  REGION 1..120: note = Synthetic polypeptide representing artificial human antibody VH chain
QLQLQESGPGLVKPSETLSLTCTVSGVSIGTSSYYWGWIRQPPAKGLEWIGSIYYSGSTYYNPSLKNRVTISVDTSKNHFSLKLSSVTAADTAVYYCARHRTGQYYYNSWGQGTLVTVSS

SEQ ID NO: 226 - protein, 117 aa, synthetic construct
  REGION 1..117: note = Synthetic polypeptide representing artificial human antibody VH chain
QVQLQESGPGLVKPSETLSLTCSVSGDSFSDYYWSWTRQSPGKGLEWLGYMFYGGSTNYNPSLKSRLTMSVDTSKKHVYLKLSSVTAADTAVYYCAASGYGDHVAYWGQGTLVTVSS

SEQ ID NO: 227 - protein, 221 aa, synthetic construct
  REGION 1..221: note = Synthetic polypeptide representing artificial human antibody VH chain
QVQLVESGGGVVQPGRSLRLSCVASGFTFSNYAMHWVRQAPGKGLEWVAVIWYDGSNEYYRDSVEGRFTISRDSSKNTLYLLVNSLRAEDTAVYYCARGNGPKSGKYSDFDYWGQGTLVTVSSASTKGPSVFPLAPSSKSTSGGTAALGCLVKDYFPEPVTVSWNSGALTSGVHTFPAVLQSSGLYSLSSVVTVPSSSLGTQTYICNVNHKPSNTKVDKSE

SEQ ID NO: 228 - protein, 117 aa, synthetic construct
  REGION 1..117: note = Synthetic polypeptide representing artificial human antibody VH chain
QVQLVQSGTEVKKPGASVKVSCKASGYRFTSNGISWVRQAPGQGLQWMGWISTDSGNTNYAQSFQGRVTLTRDTSTNTAYLELRRLRSEDTAVYYCARDKSWYFDYWGQGTLVSVSS

SEQ ID NO: 229 - protein, 221 aa, synthetic construct
  REGION 1..221: note = Synthetic polypeptide representing artificial human antibody VH chain
CEVQLVESGGGVVRPGGSLRLSCAASGFTFDDYGMSWVRQAPGKGLEWVSGIHWNGGSTGYADSVKGRFTISRDNAKNSLYLQMNSLRAEDTALYHCARSTASSGYYDAFDIWGQGTMVTVSSASTKGPSVFPLAPSSKSTSGGTAALGCLVKDYFPEPVTVSWNSGALTSGVHTFPAVLQSSGLYSLSSVVTVPSSSLGTQTYICNVNHKPSNTKVDKSE

SEQ ID NO: 230 - protein, 227 aa, synthetic construct
  REGION 1..227: note = Synthetic polypeptide representing artificial human antibody VH chain
QVQLVESGGGVVQPGRSLRLSCAASGFSFSAYGMHWVRQAPGKGLEWVAIMWYDGNNKYYADSVKGRFTISRDNSKNTLYLQMNSLRAEDTAVYYCARDRREYSSSSRPSYHYYYMDVWGKGTTVTVSSASTKGPSVFPLAPSSKSTSGGTAALGCLVKDYFPEPVTVSWNSGALTSGVHTFPAVLQSSGLYSLSSVVTVPSSSLGTQTYICNVNHKPSNTKVDKSE

SEQ ID NO: 231 - protein, 218 aa, synthetic construct
  REGION 1..218: note = Synthetic polypeptide representing artificial human antibody VH chain
VVQLLESGGGLVHPGGSLRISCAASEFTFSAYAMTWVRQAPGKGLEWVSAISGSGGRTYYADSLKGRFTISRDNSKHTLYLLMNSLRVEDTAVYYCASRYRSPSGAFDIWGQGTLVTVSSASTKGPSVFPLAPSSKSTSGGTAALGCLVKDYFPEPVTVSWNSGALTSGVHTFPAVLQSSGLYSLSSVVTVPSSSLGTQTYICNVNHKPSNTKVDKRV

SEQ ID NO: 232 - protein, 215 aa, synthetic construct
  REGION 1..215: note = Synthetic polypeptide representing artificial human antibody VH chain
EVQLVESGGGLVKPGGSLRLSCAASGFTFSNAWMNWVRQTPGKGLEWVGRIKTKTDGGTTDYAEPVKGRFTISRDDSKNTLYLQMNSLKTEDTAVYYCTRGAVADYWGQGTQVTVSSASTKGPSVFPLAPSSKSTSGGTAALGCLVKDYFPEPVTVSWNSGALTSGVHTFPAVLQSSGLYSLSSVVTVPSSSLGTQTYICNVNHKPSNTKVDKRV

SEQ ID NO: 233 - protein, 219 aa, synthetic construct
  REGION 1..219: note = Synthetic polypeptide representing artificial human antibody VH chain
QVQLKQSGGGVVQPGRSLTLSCVASGLTFSDYGMHWVRQAPGKGLEWVAVIWHDGSKTNYADSVKGRIIISRDNSKSTVYLQMNRLRGEDTAVYYCATSHGGLVPGGENYWGQGTLVTVSSASTKGPSVFPLAPSSKSTSGGTAALGCLVKDYFPEPVTVSWNSGALTSGVHTFPAVLQSSGLYSLSSVVTVPSSSLGTQTYICNVNHKPSNTKVDKRV

SEQ ID NO: 234 - protein, 123 aa, synthetic construct
  REGION 1..123: note = Synthetic polypeptide representing artificial human antibody VH chain
QVQLVQSGSELKKPGASVKVSCTSSGYVFTSFGVSWVRQVPGQGPEWMGWISPYTRQTKYAQSLQGRITLTADTSTNTTYMELRSLRSDDTAMYYCVREEFGVVRGPNPFDVWGQGTMVTVSS

SEQ ID NO: 235 - protein, 224 aa, synthetic construct
  REGION 1..224: note = Synthetic polypeptide representing artificial human antibody VH chain
EVQLVESGGGVVQPGGSLRLSCAASGFTFEDFGMHWVRQAPGKGLEWVAFTRFDGSEKYYVDSVKGRFTVSRDNSKNTLFLHMNSLRPEDTAVYYCAKTRSYSSADTTRPNAPGYWGQGTLVTVSSASTKGPSVFPLAPSSKSTSGGTAALGCLVKDYFPEPVTVSWNSGALTSGVHTFPAVLQSSGLYSLSSVVTVPSSSLGTQTYICNVNHKPSNTKVDKRV

SEQ ID NO: 236 - protein, 220 aa, synthetic construct
  REGION 1..220: note = Synthetic polypeptide representing artificial human antibody VH chain
QVQLVESGGGVVQPGRSLRLSCAASGFTLSTYGMHWVRQAPGKGLEWVAVISHDGSNNYYADYVKGRFTISRDNSKNTLYLQMNSLRIEDTAVYYCAKDGQTGTTTPYFDYWGQGTLVTVSSASTKGPSVFPLAPCSRSTSESTAALGCLVKDYFPEPVTVSWNSGALTSGVHTFPAVLQSSGLYSLSSVVTVTSSNFGTQTYTCNVDHKPSNTKVDKTV

SEQ ID NO: 237 - protein, 219 aa, synthetic construct
  REGION 1..219: note = Synthetic polypeptide representing artificial human antibody VH chain
PVQLVQSGAQVKKPGASVRLSCKSSGYTFSNYAIHWLRQAPGQRLEWVGWIHVGNDHTRYSQSFQGRVTISADTSANTAYMEVRGLRSEDTSLFYCARAGAEGVDYWGQGTQVTVSSASPTSPKVFPLSLCSTQPDGNVVIACLVQGFFPQEPLSVTWSESGQGVTARNFPPSQDASGDLYTTSSQLTLPATQCLAGKSVTCHVKHYTNPSQDVTVPCP

SEQ ID NO: 238 - protein, 219 aa, synthetic construct
  REGION 1..219: note = Synthetic polypeptide representing artificial human antibody VH chain
AVQLVQSGAEVKKPGESLRISCKGSGYSFSTYWIIWVRQMPGKGLEWIGRFDPSDSYNVNSPSFQGHVTISADTSINTAYLQWSSLKASDSAMYYCARRSDKAVPGTFDQWGQGTLVTVSSASTKGPSVFPLAPCSRSTSESTAALGCLVKDYFPEPVTVSWNSGALTSGVHTFPAVLQSSGLYSLSSVVTVPSSNFGTQTYTCNVDHKPSNTKVDKTV

SEQ ID NO: 239 - protein, 221 aa, synthetic construct
  REGION 1..221: note = Synthetic polypeptide representing artificial human antibody VH chain
QITLKESGPTLLKPTQTLTLTCNFSGFSLTTYGVGVAWIRQPPGKALEWLALIYWDDDKRYSPSLKSRLTVTKDTSKNQVVLTMTNMDPVDTATYYCAHRGGKNPRYWYFDLWGRGTLVTVSSASTKGPSVFPLAPSSKSTSGGTAALGCLVKDYFPEPVTVSWNSGALTSGVHTFPAVLQSSGLYSLSSVVTVPSSSLGTQTYICNVNHKPSNTKVDKKV

SEQ ID NO: 240 - protein, 218 aa, synthetic construct
  REGION 1..218: note = Synthetic polypeptide representing artificial human antibody VH chain
EVQLVESGGGLVKPRGSLRLSCAASGFTFSAYGMNWVRQAPGKGLEWVSSISGDSRDIYYGASMKGRFTISRDNAKSSLYLQMNSLRAEDTAVYYCARGEGGELWAFDYWGLGVLVTVSSASTKGPSVFPLAPSSKSTSGGTAALGCLVKDYFPEPVTVSWNSGALTSGVHTFPAVLQSSGLYSLSSVVTVPSSSLGTQTYICNVNHKPSNTKVDKKA

SEQ ID NO: 241 - protein, 219 aa, synthetic construct
  REGION 1..219: note = Synthetic polypeptide representing artificial human antibody VH chain
PVQLVQSGAEVKKPGSSVQVSCKGSGGTFSEYGISWLRQAPGQGLEWIGGIIPVLGIPNYAQKFRGRVTITADESTGSAYMEVSSLRSEDTAVYYCAREGLRLARGWFHPWGQGTLVTVTSASTKGPSVFPLAPSSKSTSGGTAALGCLVKDYFPEPVTVSWNSGALTSGVHTFPAVLQSSGLYSLSSVVTVPSSSLGTQTYICNVNHKPSNTKVDKSE

SEQ ID NO: 242 - protein, 120 aa, synthetic construct
  REGION 1..120: note = Synthetic polypeptide representing artificial human antibody VH chain
QVQLQESGPGLVKPSETLSLICTVSGASVNSGTHFWSWIRQPPGKGLEWIGYVYYSGNTNYNPSLKSRVAISVDTSKNQFSLKLTSVTSADTAVYYCARDFDDGYDIRYWGQGTRVSVSS

SEQ ID NO: 243 - protein, 218 aa, synthetic construct
  REGION 1..218: note = Synthetic polypeptide representing artificial human antibody VH chain
VVQLVESGGGLVQPGGSLRLSCSASGFTFSSYAMHWVRQAPGKGLEYVSAISSNGGSTYYADSVKGRFTISRDNSKNTLYLQMSSLRAEDTAVYYCVKSPVAANDAFDIWGQGTMVTVSSASTKGPSVFPLAPSSKSTSGGTAALGCLVKDYFPEPVTVSWNSGALTSGVHTFPAVLQSSGLYSLSSVVTVPSSSLGTQTYICNVNHKPSNTKVDKSV

SEQ ID NO: 244 - protein, 219 aa, synthetic construct
  REGION 1..219: note = Synthetic polypeptide representing artificial human antibody VH chain
CEVQLVESGGGLVQPGGSLRLSCVASGFTFSSYSMNWVRQAPGKGLKWVSYISSSRSTIYNADSVKGRFTISRDNAKKSLYLQMNSLRAEDTAVYYCARVSVAAPTCLDYWGQGTLVTVSSASTKGPSVFPLAPSSKSTSGGTAALGCLVKDYFPEPVTVSWNSGALTSGVHTFPAVLQSSGLYSLSSVVTVPSSSLGTQTYICNVNHKPSNTKVDKKV

SEQ ID NO: 245 - protein, 221 aa, synthetic construct
  REGION 1..221: note = Synthetic polypeptide representing artificial human antibody VH chain
QLQLQESGPGLVKPSETLSLTCTVAGDSISRSNYYWAWIRQPPGKGLEWIGSIIHTGTTYHNPSLRSRGTILVDTSKNQFSLKLSSVTAADTGLYYCARHSGHDQLPLDFDNWGQGTLVTVSSASTKGPSVFPLAPSSKSTSGGTAALGCLVKDYFPEPVTVSWNSGALTSGVHTFPAVLQSSGLYSLSSVVTVPSSSLGTQTYICNVNHKPSNTKVDKSE

SEQ ID NO: 246 - protein, 116 aa, synthetic construct
  REGION 1..116: note = Synthetic polypeptide representing artificial human antibody VH chain
EVQLVESGGGLVQPGGSLRLSCAASGFTFSKFWMHWVRQAPGKGLVWLSRINTDGTVTTYADSVKGRFTISRDNAKSTLYLQMNSLRVEDTAVYYCAGGGSQVDFWGQGTLVTVSS

SEQ ID NO: 247 - protein, 223 aa, synthetic construct
  REGION 1..223: note = Synthetic polypeptide representing artificial human antibody VH chain
QITLKESGPTLVKPTQTLTLTCTFSGFSLTTTGVGVGWIRQPPGKALEWLALIYWDDDKRYSPSLKSRLIITKDTSKNQVVLTMTNMDPVDTATYYCAHRFGRGVSYYYYGMDVWGQGTTVTVSSASTKGPSVFPLAPSSKSTSGGTAALGCLVKDYFPEPVTVSWNSGALTSGVHTFPAVLQSSGLYSLSSVVTVPSSSLGTQTYICNVNHKPSNTKVDKKV

SEQ ID NO: 248 - protein, 217 aa, synthetic construct
  REGION 1..217: note = Synthetic polypeptide representing artificial human antibody VH chain
QVQLVESGGGVVQPGRSLRLSCAASGFIFSSYGMHWVRQAPGKGLEWVAVISYDGSNKYYADSVKGRFTISRDKSKNTLHLQMNSLRAEDTAVYYCAKDSGSNDDMDVWGKGTTVTVSSASTKGPSVFPLAPSSKSTSGGTAALGCLVKDYFPEPVTVSWNSGALTSGVHTFPAVLQSSGLYSLSSVVTVPSSSLGTQTYICNVNHKPSNTKVDKSE

SEQ ID NO: 249 - protein, 219 aa, synthetic construct
  REGION 1..219: note = Synthetic polypeptide representing artificial human antibody VH chain
CEVQLVESGGGLVQPGGSLRLSCAASGFTFSSYEMNWVRQAPGKGLEWVSYISSSGSTIYYADSVKGRFTISRDNAKNSLYLQMNSLRAEDTAVYYCARRGFYYYYGMDVWGQGTTVTVSSASTKGPSVFPLAPSSKSTSGGTAALGCLVKDYFPEPVTVSWNSGALTSGVHTFPAVLQSSGLYSLSSVVTVPSSSLGTQTYICNVNHKPSNTKVDKSE

SEQ ID NO: 250 - protein, 216 aa, synthetic construct
  REGION 1..216: note = Synthetic polypeptide representing artificial human antibody VH chain
CEVQLVESGGGLVQPGGSLRLSCAASGFTFSSYSMNWVRQAPGKGLEWVSYISSSSSTIYYADSVKGRFTISRDNAKNSLYLQMNSLRAEDTAVYYCASLLGGDPDYWGQGTLVTVSSASTKGPSVFPLAPSSKSTSGGTAALGCLVKDYFPEPVTVSWNSGALTSGVHTFPAVLQSSGLYSLSSVVTVPSSSLGTQTYICNVNHKPSNTKVDKKV

SEQ ID NO: 251 - protein, 226 aa, synthetic construct
  REGION 1..226: note = Synthetic polypeptide representing artificial human antibody VH chain
PVTLRESGPALVKPTQTLTLTCTFSGFSLSTSGMCVSWIRQPPGKALEWLARIDWDDDKYYSTSLKTRLTISKDTSKNQVVLTMTNMDPVDTATYYCARMQIVATTQTYYYYYGMDVWGQGTTVTVSSASTKGPSVFPLAPSSKSTSGGTAALGCLVKDYFPEPVTVSWNSGALTSGVHTFPAVLQSSGLYSLSSVVTVPSSSLGTQTYICNVNHKPSNTKVDKSE

SEQ ID NO: 252 - protein, 218 aa, synthetic construct
  REGION 1..218: note = Synthetic polypeptide representing artificial human antibody VH chain
EVQLVESGGGLVQPGGSLRLSCAASGFTFSSYWMTWVRQAPGKGLEWVANIKQDGSEKYYVDSVKGRFTISRDNSKNSLYLQMNSLRAEDTAVYYCARAGYDLFGWFDPWGQGTLVTVSSASTKGPSVFPLAPSSKSTSGGTAALGCLVKDYFPEPVTVSWNSGALTSGVHTFPAVLQSSGLYSLSSVVTVPSSSLGTQTYICNVNHKPSNTKVDKKL

SEQ ID NO: 253 - protein, 125 aa, synthetic construct
  REGION 1..125: note = Synthetic polypeptide representing artificial human antibody VH chain
EVQLLESGGGLVQPGGSLRLSCVASGFTFASYGMAWVRQAPGQGLTWICFVGSGDTTHYAESVKGRFTCSRDNSNNTLYLHMSGLRGADTAKYYCAKPNSPFTGSGSFHNYFDYWGQGALVIVSS

SEQ ID NO: 254 - protein, 113 aa, synthetic construct
  REGION 1..113: note = Synthetic polypeptide representing artificial human antibody VH chain
EVQVVESGGGLGQPGGSLRLSCAASGFTFSSYSMNWVRQAPGKGLEWVSYISSSSSTKYYADSVKGRFTISRDNAKKSLYLQMNSLRDEDTAVYYCASPVRPWGQGTLVTVSS

SEQ ID NO: 255 - protein, 226 aa, synthetic construct
  REGION 1..226: note = Synthetic polypeptide representing artificial human antibody VH chain
QVQLVQSGAEMKKPGTSVKVSCRTSGYIFTGSFMHWVRQAPAQGLEWMGWINPKTGATYYTEKFKGRVTLTRDTSINTAYMEMTSLRSDDTAVYYCARGFCDLPACYPVPQYNWFDPWGQGTLVTVSSASTKGPSVFPLAPSSKSTSGGTAALGCLVKDYFPEPVTVSWNSGALTSGVHTFPAVLQSSGLYSLSSVVTVPSSSLGTQTYICNVNHKPSNTKVDKRV

SEQ ID NO: 256 - protein, 219 aa, synthetic construct
  REGION 1..219: note = Synthetic polypeptide representing artificial human antibody VH chain
PVQLQESGPGLVKPSQTLSLTCTVSGGSISSGTYYWSWIRQPAGKGLEWIGRIYASGSTNYNPSLKSRVTISVDTSKNQFSLKLTSVTAADTAVYYCARYSGSYPLGFDYWGQGTLVTVSSASTKGPSVFPLAPSSKSTSGGTAALGCLVKDYFPEPVTVSWNSGALTSGVHTFPAVLQSSGLYSLSSVVTVPSSSLGTQTYICNVNHKPSNTKVDKKV

SEQ ID NO: 257 - protein, 216 aa, synthetic construct
  REGION 1..216: note = Synthetic polypeptide representing artificial human antibody VH chain
GAEVQLVQSGAEVKKPGQSLKISCKGSGYSFTNYWIGWVRQMPGKGLEWMGIIYPGDSDTRYSPSFQGQVTISADKSISTAYLQWSSLKASDTAMYYCARHEGAFDIWGQGTMVTVSSASTKGPSVFPLAPSSKSTSGGTAALGCLVKDYFPEPVTVSWNSGALTSGVHTFPAVLQSSGLYSLSSVVTVPSSSLGTQTYICNVNHKPSNTKVDKKV

SEQ ID NO: 258 - protein, 121 aa, synthetic construct
  REGION 1..121: note = Synthetic polypeptide representing artificial human antibody VH chain
VVQLVESGGGLVKPGGSLRLSCAASGFTFSNAWMSWVRQAPGKGLEWVGRIKSKTDGGTTDYTAPVKGRFTISRDDSKNTLYLQMNSLKTEDTAVYYCTTDLAVTTRFDYWGQGTLVTVSS

SEQ ID NO: 259 - protein, 216 aa, synthetic construct
  REGION 1..216: note = Synthetic polypeptide representing artificial human antibody VH chain
QVQLVESGGGVVQPGRSLRLSCAASGFPFSTYALHWVRQAPGKGLEWVAVISKDGNSKSSAESVKGRFTISRDKSRNTLYLQMNSLRPEDTAVYYCARSTRTDALDVWGQGTTVTVSSASTKGPSVFPLAPSSKSTSGGTAALGCLVKDYFPEPVTVSWNSGALTSGVHTFPAVLQSSGLYSLSSVVTVPSSSLGTQTYICNVNHKPSNTKVDKRV

SEQ ID NO: 260 - protein, 220 aa, synthetic construct
  REGION 1..220: note = Synthetic polypeptide representing artificial human antibody VH chain
EVQLVESGGGLVQPGGSLKLSCAASGFSFSGSSVHWVRQASGKGLEWVGRIRSKTKNYATAYAASVKGRFTISRDDSKNTAFLQMRSLKAEDTAVYYCAKNDEMDFKGYDYWGQGTLVTVSSASTKGPSVFPLAPSSKSTSGGTAALGCLVKDYFPEPVTVSWNSGALTSGVHTFPAVLQSSGLYSLSSVVTVPSSSLGTQTYICNVNHKPSNTKVDKKV

SEQ ID NO: 261 - protein, 213 aa, synthetic construct
  REGION 1..213: note = Synthetic polypeptide representing artificial human antibody VH chain
QVQLQESGPGLVKPSETLSLTCTVSGGSISSYYWSWIRQPAGKGLEWIGRIYTSGSTNYNPSLKSRVTMSVDTSKNQFSLKMSSVTAADTAVYYCARGELLFDHWGQGTLVTVSSASTKGPSVFPLAPSSKSTSGGTAALGCLVKDYFPEPVTVSWNSGALTSGVHTFPAVLQSSGLYSLSSVVTVPSSSLGTQTYICNVNHKPSNTKVDKNV

SEQ ID NO: 262 - protein, 217 aa, synthetic construct
  REGION 1..217: note = Synthetic polypeptide representing artificial human antibody VH chain
EVQLVESGGGLVQPGRSLRLSCVASGFTFGDYAVNWFRQAPGKGLEWVGFISTKGYDETAEYAASVKGRFTMSRDDSKNIAYLLMDSLKAEDTAMYYCARESTVVLDFWGQGTLVAVSSASTKGPSVFPLAPSSKSTSGGTAALGCLVKDYFPEPVTVSWNSGALTSGVHTFPAVLQSSGLYSLSSVVTVPSSSLGTQTYICNVNHKPSNTKVDKKV

SEQ ID NO: 263 - protein, 217 aa, synthetic construct
  REGION 1..217: note = Synthetic polypeptide representing artificial human antibody VH chain
QVQLVDSGGGVVQPGGSLRLSCAASGFTLSNYGMNWVRQAPGKGLEWVAFIPYDGSNKYYADSVKGRFTISRDISKNTLYLQMNSLRTEDTAVYYCAKRSTAVGDFDPWGQGTLVTVSSASTKGPSVFPLAPSSKSTSGGTAALGCLVKDYFPEPVTVSWNSGALTSGVHTFPAVLQSSGLYSLSSVVTVPSSSLGTQTYICNVNHKPSNTKVDKKV

SEQ ID NO: 264 - protein, 225 aa, synthetic construct
  REGION 1..225: note = Synthetic polypeptide representing artificial human antibody VH chain
EVQLVESGGGLVQPGGSLRLSCAASGFSITTHSMNWVRQAPGKGLQWVAYISTSTSTIYYADSVEGRFTISRDKAKNALYLQMDSLRAQDTAVYYCARGPSNWNGGPEHMDVWGKGTTVTVSSASPTSPKVFPLSLDSTPQDGNVVVACLVQGFFPQEPLSVTWSESGQNVTARNFPPSQDASGDLYTTSSQLTLPATQCPDGKSVTCHVKHYTNPSQDVTVPCP

SEQ ID NO: 265 - protein, 211 aa, synthetic construct
  REGION 1..211: note = Synthetic polypeptide representing artificial human antibody VH chain
VVQLVESGGGLVQPGGSLRLSCAASGFTFSSYEMNWVRQAPGKGLEWVSYISSSGSTIYYADSVKGRFTISRDNAKNSLYLQMNSLRAEDTAVYYCARDFDYWGQGTLVTVSSASTKGPSVFPLAPSSKSTSGGTAALGCLVKDYFPEPVTVSWNSGALTSGVHTFPAVLQSSGLYSLSSVVTVPSSSLGTQTYICNVNHKPSNTKVDKNV

SEQ ID NO: 266 - protein, 219 aa, synthetic construct
  REGION 1..219: note = Synthetic polypeptide representing artificial human antibody VH chain
VVQLVESGGGLVQPGGSLRLSCAASGFTFSSYSMNWVRQAPGKGLEWVSYISSSSSTIYYADSVKGRFTISRDNAKNSLYLQMNSLRDEDTAVYYCARDPYGSGTVWFDPWGQGTLVTVSSASTKGPSVFPLAPSSKSTSGGTAALGCLVKDYFPEPVTVSWNSGALTSGVHTFPAVLQSSGLYSLSSVVTVPSSSLGTQTYICNVNHKPSNTKVDKNV

SEQ ID NO: 267 - protein, 224 aa, synthetic construct
  REGION 1..224: note = Synthetic polypeptide representing artificial human antibody VH chain
EAQLVESGGGLIQPGGSLRLSCAASGFSVSSKYMSWVRQAPGKGLEWVSVMYSGGATYYADSVKGRFVISRDSSKNTVFLQMNSLRAEDTAVYYCAKTEYTFLSGSDYYQYGMDVWGQGTTVTVSSASTKGPSVFPLAPSSKSTSGGTAALGCLVKDYFPEPVTVSWNSGALTSGVHTFPAVLQSSGLYSLSSVVTVPSSSLGTQTYICNVNHKPSNTKVDKRV

SEQ ID NO: 268 - protein, 221 aa, synthetic construct
  REGION 1..221: note = Synthetic polypeptide representing artificial human antibody VH chain
PVQLVQSGAEVKKPGESLKISCKGSGYSFTNYWIGWVRQMPGKGLEWMGIIYPGDSDTRYSPSFQGQVTISADKSISTAYLQWSSLKASDTAMYYCARRGLLRGSNEGRFDYWGQGTLVTVSSASTKGPSVFPLAPSSKSTSGGTAALGCLVKDYFPEPVTVSWNSGALTSGVHTFPAVLQSSGLYSLSSVVTVPSSSLGTQTYICNVNHKPSNTKVDKKV

SEQ ID NO: 269 - protein, 222 aa, synthetic construct
  REGION 1..222: note = Synthetic polypeptide representing artificial human antibody VH chain
VVQLVESGGDLVQPGGSLKLSCAASGFTFSGSAMHWVRQASGKGLEWVGRIRSKPNSYATAYAVSVKGRFTISRDDSKNTAYLQMNSLKTEDTAVYYCTRRGSAWTDPYYTDVWGKGTTVTVSSASTKGPSVFPLAPSSKSTSGGTAALGCLVKDYFPEPVTVSWNSGALTSGVHTFPAVLQSSGLYSLSSVVTVPSSSLGTQTYICNVNHKPSNTKVDKRE

SEQ ID NO: 270 - protein, 222 aa, synthetic construct
  REGION 1..222: note = Synthetic polypeptide representing artificial human antibody VH chain
SVQLVESGGGVVQPGRSLRLSCAASGFTFSDYGMHWVRQAPGKGLEWVAVIWYDGSNEYYADSVKGRFTISRDNSKNTVYLQMNSLGAEDTAVYYCARDDVPRGYDYWGQGTLVTVSSGSASAPTLFPLVSCENSPSDTSSVAVGCLAQDFLPDSITFSWKYKNNSDISSTRGFPSVLRGGKYAATSQVLLPSKDVMQGTDEHVVCKVQHPNGNKEKNVPLP

SEQ ID NO: 271 - protein, 218 aa, synthetic construct
  REGION 1..218: note = Synthetic polypeptide representing artificial human antibody VH chain
SVQLVESGGGVVQPGRSLRLSCAASGYTFNNYGMHWVRQAPGKGLEWVAIIWYDGSNKYYADSVKGRFTISRDNSKNTLYLQMNSLRAEDTAVYYCAREYIVPFYGMDVWGQGTTVTVSSASTKGPSVFPLAPSSKSTSGGTAALGCLVKDYFPEPVTVSWNSGALTSGVHTFPAVLQSSGLYSLSSVVTVPSSSLGTQTYICNVNHKPSNTKVDKKV

SEQ ID NO: 272 - protein, 214 aa, synthetic construct
  REGION 1..214: note = Synthetic polypeptide representing artificial human antibody VL chain
DIQMTQSPSSLSASVGDRVSITCRASQGVSSYLAWYQKKPGRAPKLLIYSASSLQSGVPSRFSGSGSGTDFTLTITGLQPEDFATYFCQQTNTFPLTFGGGTKVEIKRTVAAPSVFIFPPSDEQLKSGTASVVCLLNNFYPREAKVQWKVDNALQSGNSQESVTEQDSKDSTYSLSSTLTLSKADYEKHKLYACEVTHQGLSSPVTKSFNRGEC

SEQ ID NO: 273 - protein, 214 aa, synthetic construct
  REGION 1..214: note = Synthetic polypeptide representing artificial human antibody VL chain
DIQMTQSPSSLSASVGDRVTITCRASQSIGSYLNWYQQKPGKAPKLLIYAASSLQSGVPSRFSGSGSGTDFTLTISSLQPEDFATYYCQQSYSTPPRFGQGTKLEIKRTVAAPSVFIFPPSDEQLKSGTASVVCLLNNFYPREAKVQWKVDNALQSGNSQESVTEQDSKDSTYSLSSTLTLSKADYEKHKVYACEVTHQGLSSPVTKSFNRGEC

SEQ ID NO: 274 - protein, 214 aa, synthetic construct
  REGION 1..214: note = Synthetic polypeptide representing artificial human antibody VL chain
DIQMTQSPSYVSASVGDRVTITCRASQGIDVWLAWYQQKPGKAPKLLIYTASSLQSGVPSRFSGSGGGTEFTLTISSLQPEDFATYYCQQSNSFPGTFGPGTKVDVKRTVAAPSVFIFPPSDEQLKSGTASVVCLLNNFYPREAKVQWKVDNALQSGNSQESVTEQDSKDSTYSLSSTLTLSKADYEKHKVYACEVTHQGLSSPVTKSFNRGEC

SEQ ID NO: 275 - protein, 110 aa, synthetic construct
  REGION 1..110: note = Synthetic polypeptide representing artificial human antibody VL chain
PSVLTQPPSASGTPGQRVTISCSGSSSNIGSNYVYWYQQLPGTAPKFLIYRNNQRPSGVPDRFSGSKSGTSASLAISGLRSEDEADYYCAAWEDSLSGPVFGGGTKLTVL

SEQ ID NO: 276 - protein, 212 aa, synthetic construct
  REGION 1..212: note = Synthetic polypeptide representing artificial human antibody VL chain
SSELTQDPAVSVALGQTVRITCQGDSLRNYYASWFQQKPGQAPVLVIFGKNYRPSGIPDRFSGSNSGNTASLTITGAQAEDEADYYCNSRDRSGYVFGSGTKVTVLGQPKANPTVTLFPPSSEELQANKATLVCLISDFYPGAVTVAWKADGSPVKAGVETTKPSKQSNNKYAASSYLSLTPEQWKSHRSYSCQVTHEGSTVEKTVAPTECS

SEQ ID NO: 277 - protein, 214 aa, synthetic construct
  REGION 1..214: note = Synthetic polypeptide representing artificial human antibody VL chain
LYVLTQPPSVSVAPGTTAWISCGGNNIGIKSVHWYQQKPGQAPLLVISYDSDRPSVIPERFSVSNSGNTVTLTISRVEAGDEADYYCQVWDNGHSHWVFGGGTKLTVLGQPKAAPSVTLFPPSSEELQANKATLVCLISDFYPGAVTVAWKADSSPVKAGVETTTPSKQSNNKYAASSYLSLTPEQWKSHRSYSCQVTHEGSTVEKTVAPTECS

SEQ ID NO: 278 - protein, 106 aa, synthetic construct
  REGION 1..106: note = Synthetic polypeptide representing artificial human antibody VL chain
DIQMTQSPSSLSASVGDRVTITCRASQSISSYLNWYQQKPGRAPRLLIYAASRLQIGVPSRFSGSGSGTDFTLTISSLQPEDFATYYCQQSYRMPCSFGQGTKLEI

SEQ ID NO: 279 - protein, 216 aa, synthetic construct
  REGION 1..216: note = Synthetic polypeptide representing artificial human antibody VL chain
EIVLTQSPGTLSLSPGERATLSCRASQSVSSSYLAWYQQKPGQAPRLLIYDASSRATGIPDRFSGSGSGTDFTLTISRLEPEDFAVYYCQQYGSSPPITFGQGTRLEIKRTVAAPSVFIFPPSDEQLKSGTASVVCLLNNFYPREAKVQWKVDNALQSGNSQESVTEQDSKDSTYSLSSTLTLSKADYEKHKLYACEVTHQGLSSPVTKSFNRGEC

SEQ ID NO: 280 - protein, 110 aa, synthetic construct
  REGION 1..110: note = Synthetic polypeptide representing artificial human antibody VL chain
HFMLTQPHSVSESPGKTVTISCTRSSGNIASYYVQWYQQRPGSAPTTVIYEDDQRPSGVPDRFSASIDSSSNSASLTISGLKTEDEADYYCQSYDTTNVIFGGGTKLTVL

SEQ ID NO: 281 - protein, 215 aa, synthetic construct
  REGION 1..215: note = Synthetic polypeptide representing artificial human antibody VL chain
EIVLTQSPGTLSLSPGERATLSCRASQSVSSSYLAWYQQKPGQAPRLLIFGASTRASGIPDRFSGRGSGTEFTLTISRLEPEDFAVYYCQQYDSSPFTFGPGTKVEIKRTVAAPSVFIFPPSDEQLKSGTASVVCLLNNFYPREAKVQWKVDNALQSGNSQESVTEQDSKDSTYSLSSTLTLSKADYEKHKLYACEVTHQGLSSPVTKSFNRGEC

SEQ ID NO: 282 - protein, 215 aa, synthetic construct
  REGION 1..215: note = Synthetic polypeptide representing artificial human antibody VL chain
PSVLTQPPSVSAAPGQNVTISCSGSSSNIENNDVSWYQQLPGTAPKVIIYENNQRPSGIPDRFSGSKSGTSATLGITGLQTGDEADYYCGTWDDNLSAVFGGGTKLTVLGQPKAAPSVTLFPPSSEELQANKATLVCLISDFYPGAVTVAWKADSSPVKAGVETTTPSKQSNNKYAASSYLSLTPEQWKSHRSYSCQVTHEGSTVEKTVAPTECS

SEQ ID NO: 283 - protein, 112 aa, synthetic construct
  REGION 1..112: note = Synthetic polypeptide representing artificial human antibody VL chain
DVVMTQSPLSLPVTLGQPASISCRSSQSLVHSDGNTYLNWFQQRPGQSPRRLIYMVSNRDSGVPDRFSGSGSGTDFTLKISRVEAEDVGVYYCLQGTHWPPTIGQGTKVEIE

SEQ ID NO: 284 - protein, 216 aa, synthetic construct
  REGION 1..216: note = Synthetic polypeptide representing artificial human antibody VL chain
PSGLTQPPSASGTPGQRVTMSCSGSSSNIGRNYVYWYQQLPGAAPKLLIYRDNQRPSGVPDRFSGSKSGTSASLAISGLRSEDEADYYCAAWDDNVSGPGFGAGTRLTVLGQPKANPTVTLFPPSSEELQANKATLVCLISDFYPGAVTVAWKADGSPVKAGVETTKPSKQSNNKYAASSYLSLTPEQWKSHRSYSCQVTHEGSTVEKTVAPTECS

SEQ ID NO: 285 - protein, 216 aa, synthetic construct
  REGION 1..216: note = Synthetic polypeptide representing artificial human antibody VL chain
PAVLTQSPSASGTPGQRVTISCFGSISNIGSNPVNWYQQVPGAAPKLLIYSSSQRPSGVPDRFSGSKSGTSASLAISGLQSEDEADYYCATWDDSLNGPVFGGGTKLTVLGQPKAAPSVTLFPPSSEELQANKATLVCLISDFYPGAVTVAWKADSSPVKAGVETTTPSKQSNNKYAASSYLSLTPEQWKSHRSYSCQVTHEGSTVEKTVAPTECS

SEQ ID NO: 286 - protein, 213 aa, synthetic construct
  REGION 1..213: note = Synthetic polypeptide representing artificial human antibody VL chain
ETVMTQSPATLSVSPGDRATLSCRASQNVNFNLAWYQQKPGQAPRLLIYDASTRATGIPARFSGSASGTEFTLTINSLQSEDFAVYYCQQYNNWWTFGQGTKLEIKRTVAAPSVFIFPPSDEQLKSGTASVVCLLNNFYPREAKVQWKVDNALQSGNSQESVTEQDSKDSTYSLSSTLTLSKADYEKHKVYACEVTHQGLSSPVTKSFNRGEW

SEQ ID NO: 287 - protein, 215 aa, synthetic construct
  REGION 1..215: note = Synthetic polypeptide representing artificial human antibody VL chain
EIVLTQSPGTLSLSPGERATLSCRASQSVSSSSLAWYQQKPGQAPRLLIYGASSRATGIPDRFSGSGSGTDFTLTISRLEPEDFAVYYCQQYGSFRYTFGQGTKLEIKRTVAAPSVFIFPPSDEQLKSGTASVVCLLNNFYPREAKVQWKVDNALQSGNSQESVTEQDSKDSTYSLSSTLTLSKADYEKHKVYACEVTHQGLSSPVTKSFNRGEW

SEQ ID NO: 288 - protein, 213 aa, synthetic construct
  REGION 1..213: note = Synthetic polypeptide representing artificial human antibody VL chain
PYELTQPPSVSVSPGQTARITCSGDALPKQYAYWYQQKPGQAPVLVIYKDSERPSGIPERFSGSSSGTTVTLTISGVQAEDEADYYCQSADSSDTYVFGGGTKLTVLGQPKAAPSVTLFPPSSEELQANKATLVCLISDFYPGAVTVAWKADSSPVKAGVETTTPSKQSNNKYAASSYLSLTPEQWKSHRSYSCQVTHEGSTVEKTVAPTECS

SEQ ID NO: 289 - protein, 214 aa, synthetic construct
  REGION 1..214: note = Synthetic polypeptide representing artificial human antibody VL chain
EIVLTQSPATLSLSPGERATLSCRASQSVSSYLAWYQQKPGQAPRLLIYDASNRATGIPARFSGSGSGTDFTLTISSLEPEDFAVYYCQQRSNWPLTFGGGTKVEIKRTVAAPSVFIFPPSDEQLKSGTASVVCLLNNFYPREAKVQWKVDNALQSGNSQESVTEQDSKDSTYSLSSTLTLSKADYEKHKVYACEVTHQGLSSPVTKSFNRGEW

SEQ ID NO: 290 - protein, 215 aa, synthetic construct
  REGION 1..215: note = Synthetic polypeptide representing artificial human antibody VL chain
EIVLTQSPATLSLSPGERATLSCRASQSVGSYLAWYQQKPGQAPRLLIYDASNRATGIPARFSGSGSGTDFTLTISSLEPEDFAVYYCQQGSNWLALTFGGGTKVEIKRTVAAPSVFIFPPSDEQLKSGTASVVCLLNNFYPREAKVQWKVDNALQSGNSQESVTEQDSKDSTYSLSSTLTLSKADYEKHKVYACEVTHQGLSSPVTKSFNRGEC

SEQ ID NO: 291 - protein, 213 aa, synthetic construct
  REGION 1..213: note = Synthetic polypeptide representing artificial human antibody VL chain
IQMTQSPSSLSASVGDRVTITCRASQAIANSLAWYQQRPGKAPKLLIYAASSLESGVPSRFSGSGSGTDYTLTISSLQPEDFATYYCQQYYINPRTFGQGTKVEIKRTVAAPSVFIFPPSDEQLKSGTASVVCLLNNFYPREAKVQWKVDNALQSGNSQESVTEQDSKDSTYSLSSTLTLSKADYEKHKVYACEVTHQGLSSPVTKSFNRGEC

SEQ ID NO: 292 - protein, 220 aa, synthetic construct
  REGION 1..220: note = Synthetic polypeptide representing artificial human antibody VL chain
GIVMTQSPDSLAVSLGERATINCKSSQSVLYSSNNENYLAWYQQKPGQPPKLLIYWASTRESGVPDRFSGSGSGTDFTLTISSLQAEDVAVYYCQQYYSTPYTFGQGTKLEIKRTVAAPSVFIFPPSDEQLKSGTASVVCLLNNFYPREAKVQWKVDNALQSGNSQESVTEQDSKDSTYSLSSTLTLSKADYEKHKVYACEVTHQGLSSPVTKSFNRGEW

SEQ ID NO: 293 - protein, 106 aa, synthetic construct
  REGION 1..106: note = Synthetic polypeptide representing artificial human antibody VL chain
DIQMTQSPSSLSASVGDRVTISCRASHNINTYLNWYQHKPGKAPKIVIYGASSLQSGVPSRFSGSGSGTDFSLTISSLQREDFATYFCQQSFNTVLTFGGGTRVDI

SEQ ID NO: 294 - protein, 217 aa, synthetic construct
  REGION 1..217: note = Synthetic polypeptide representing artificial human antibody VL chain
QSALTQPASVSGSPGQSITISCTGTSSDVGGYNYVSWYQQHPGKAPKLMIYEVSNRPSGVSNRFSGSKSGNTASLTISGLQAEDEADYHCSSYTITSTLWVFGGGTKLTVLGQPKAAPSVTLFPPSSEELQANKATLVCLISDFYPGAVTVAWKADSSPVKAGVETTTPSKQSNNKYAASSYLSLTPEQWKSHKSYSCQVTHEGSTVEKTVAPTECS

SEQ ID NO: 295 - protein, 216 aa, synthetic construct
  REGION 1..216: note = Synthetic polypeptide representing artificial human antibody VL chain
QSVLTQPPSASGTPGQGVTISCSGTSANIGKNYVSWYQHLPGTAPRLLIYRIDQRPSGVPDRFSGSKSGTSASLAISGLRPEDEADYYCAAWDDSLSGPVFGGGTKLTVLGQPKAAPSVTLFPPSSEELQANKATLVCLISDFYPGAVTVAWKADSSPVKAGVETTTPSKQSNNKYAASSYLSLTPEQWKSHRSYSCQVTHEGSTVEKTVAPTECS

SEQ ID NO: 296 - protein, 214 aa, synthetic construct
  REGION 1..214: note = Synthetic polypeptide representing artificial human antibody VL chain
DLQMTQSPSSLSASIGDRVTITCRASQSISTYFNWYQQKPGKAPKLLIYAASSLQSGVPSRFSGSGSGTDFTLTITSLQPEDFATYYCQQTYSNPWTFGQGTKVDFKRTVAAPSVFIFPPSDEQLKSGTASVVCLLNNFYPREAKVQWKVDNALQSGNSQESVTEQDSKDSTYSLSSTLTLSKADYEKHKVYACEVTHQGLSSPVTKSFNRGEW

SEQ ID NO: 297 - protein, 214 aa, synthetic construct
  REGION 1..214: note = Synthetic polypeptide representing artificial human antibody VL chain
DIQMTQSPSSLSASVGDRVTITCRASQSIKNYVNWYQQKPGEAPNLLIFAASNLQSGVPSRFTGSGSGTDFSLTISSLQPEDFAAYYCQQTYSHPRTFGQGTRVEIKRTVAAPSVFIFPPSDEQLKSGTASVVCLLNNFYPREAKVQWKVDNALQSGNSQESVTEQDSKDSTYSLSSTLTLSKADYEKHKLYACEVTHQGLSSPVTKSFNRGEC

SEQ ID NO: 298 - protein, 217 aa, synthetic construct
  REGION 1..217: note = Synthetic polypeptide representing artificial human antibody VL chain
QSVLTQPPSVSGAPGQRVTISCTGSSSNIGAGYDVHWYQHLPGTAPKLLIYGDSHRPSGVPDGFSGSKSGTSASLAITGLQAEDEADYYCQSYDSSLSGYVFGTGTKVTVLGQPKANPTVTLFPPSSEELQANKATLVCLISDFYPGAVTVAWKADGSPVKAGVETTKPSKQSNNKYAASSYLSLTPEQWKSHRSYSCQVTHEGSTVEKTVAPTECS

SEQ ID NO: 299 - protein, 108 aa, synthetic construct
  REGION 1..108: note = Synthetic polypeptide representing artificial human antibody VL chain
SYVLTQPPSVSVAPGQTARIACGGNNIGSKTVHWYQQKPGQAPMVVVYDDSDRPSGIPERFSGSNSGNTATLTISRVEAGDEADYYCQVWDSSSDHYVLGTGTKVTVL

SEQ ID NO: 300 - protein, 214 aa, synthetic construct
  REGION 1..214: note = Synthetic polypeptide representing artificial human antibody VL chain
DIQMTQSPSSVSASVGDRVTITCRASQDISNWLAWYLQKPGKAPKLLIYAASSLQSGVPSRFSGSGSGTDFTLTISSLQPEDFATYYCQQTSSFPRTFGPGTKVDIKRTVAAPSVFIFPPSDEQLKSGTASVVCLLNNFYPREAKVQWKVDNALQSGNSQESVTEQDSKDSTYSLSSTLTLSKADYEKHKVYACEVTHQGLSSPVTKSFNRGEC

SEQ ID NO: 301 - protein, 213 aa, synthetic construct
  REGION 1..213: note = Synthetic polypeptide representing artificial human antibody VL chain
PYELTQPPSVSVSPGQTARITCSGDALPNENAFWYQQKPGQAPVLVIYEDIKRPSGIPERFSGSSSGTTVTLTISGVQAEDEADYYCQSVDITSTWVFGGGTKLTVLGQPKAAPSVTLFPPSSEELQANKATLVCLISDFYPGAVTVAWKADSSPVKAGVETTTPSKQSNNKYAASSYLSLTPEQWKSHKSYSCQVTHEGSTVEKTVAPTECS

SEQ ID NO: 302 - protein, 217 aa, synthetic construct
  REGION 1..217: note = Synthetic polypeptide representing artificial human antibody VL chain
QSALTQPPSVSGSPGQSVTISCTGTTSDIGSYDRVSWYQKPPGTAPKLIIYEVSHRPSGVPDRFSGSKSGNTASLTISGLQAEDEADYYCSSYISSLTYVLFGGGTKLTVLGQPKAAPSVTLFPPSSEELQANKATLVCLISDFYPGAVTVAWKADSSPVKAGVETTTPSKQSNNKYAASSYLSLTPEQWKSHRSYSCQVTHEGSTVEKTVAPTECS

SEQ ID NO: 303 - protein, 216 aa, synthetic construct
  REGION 1..216: note = Synthetic polypeptide representing artificial human antibody VL chain
PSVLTQPPSVSAAPGQKVTISCSGSSSNIGNNYVSWYQQLPGTAPKLLIYDNNKRPSGIRDRFSGSKSGTSATLGITGLQTGDEADYYCGTWDSSLSVGVFGGGTKLTVLGQPKAAPSVTLFPPSSEELQANKATLVCLISDFYPGAVTVAWKADSSPVKAGVETTTPSKQSNNKYAASSYLSLTPEQWKSHKSYSCQVTHEGSTVEKTVAPTECS

SEQ ID NO: 304 - protein, 219 aa, synthetic construct
  REGION 1..219: note = Synthetic polypeptide representing artificial human antibody VL chain
GVVMTQSPLSLPVTLGQPASISCRSSQSLVYSDGNTYLNWFQQRPGQSPRRLIYKVSNRDSGVPDRFSGSGSGTDFTLKISRVEAEDVGVYYCMQGTHWPITFGQGTRLEIKRTVAAPSVFIFPPSDEQLKSGTASVVCLLNNFYPREAKVQWKVDNALQSGNSQESVTEQDSKDSTYSLSSTLTLSKADYEKHKVYACEVTHQGLSSPVTKSFNRGEW

SEQ ID NO: 305 - protein, 108 aa, synthetic construct
  REGION 1..108: note = Synthetic polypeptide representing artificial human antibody VL chain
EIVLTQSPGTLSLSPGERATLSCRASQSIRSSYLAWYQQKPGQAPRLLIYGASSRATGIPDRFSGSGSGTDFTLTISRLEPEDFAVYYCQQYDSSSWTFGQGTKVEIK

SEQ ID NO: 306 - protein, 217 aa, synthetic construct
  REGION 1..217: note = Synthetic polypeptide representing artificial human antibody VL chain
PSVLTQPPSVSGAPGQRVTISCSGSTSNIGAGYDVHWYQQFPGTAPKLLIYGNIFRPSGVPDRFSGSKSGTSASLAITGLQAEDEAAYYCQSYDSSLRGVVFGGGTYLTVLGQPKAAPSVTLFPPSSEELQANKATLVCLISDFYPGAVTVAWKADSSPVKAGVETTTPSKQSNNKYAASSYLSLTPEQWKSHRSYSCQVTHEGSTVEKTVAPTECS

SEQ ID NO: 307 - protein, 214 aa, synthetic construct
  REGION 1..214: note = Synthetic polypeptide representing artificial human antibody VL chain
DIQMTQSPSSLSASVGDRVTITCRASQSISSYLNWYQQKPGKAPKLLIYAASSLQSGVPSRFSGSGSGTDFTLTISSLQPEDFATYYCQQSYSTPRTFGQGTKVEIKRTVAAPSVFIFPPSDEQLKSGTASVVCLLNNFYPREAKVQWKVDNALQSGNSQESVTEQDSKDSTYSLSSTLTLSKADYEKHKVYACEVTHQGLSSPVTKSFNRGEW

SEQ ID NO: 308 - protein, 220 aa, synthetic construct
  REGION 1..220: note = Synthetic polypeptide representing artificial human antibody VL chain
GIVMTQSPDSLAVSLGERATINCKSSQNVLYSSNNKNYLGWYQQKPGQPPKLLIYWASTRESGVPDRFSGSGSGTDFTLTINSLQAEDVAVYYCQQYYSTPWTFGQGTKVEIKRTVAAPSVFIFPPSDEQLKSGTASVVCLLNNFYPREAKVQWKVDNALQSGNSQESVTEQDSKDSTYSLSSTLTLSKADYEKHKVYACEVTHQGLSSPVTKSFNRGEW

SEQ ID NO: 309 - protein, 219 aa, synthetic construct
  REGION 1..219: note = Synthetic polypeptide representing artificial human antibody VL chain
PSVLTQPPSVSGAPGQKVTISCTGSSSNIGAGYDVHWYQQLPGTAPKLLIYRNNNRPSGVPDRFSGSKSGTSASLAITGLQTEDEADYYCQSYDSGLSGSKVVFGGGTKLTVLGQPKAAPSVTLFPPSSEELQANKATLVCLISDFYPGAVTVAWKADSSPVKAGVETTTPSKQSNNKYAASSYLSLTPEQWKSHRSYSCQVTHEGSTVEKTVAPTECS

SEQ ID NO: 310 - protein, 216 aa, synthetic construct
  REGION 1..216: note = Synthetic polypeptide representing artificial human antibody VL chain
HFMLTQPHSVSESPGKTVTISCTRSSGSIASSYVQWYQQRPGSSPTTMIYEDKKRPSGVPDRFSGSIDSSSNSASLTISGLKTEDEADYYCQSYDLSTWVFGGGTKLTVLGQPKAAPSVTLFPPSSEELQANKATLVCLISDFYPGAVTVAWKADSSPVKAGVETTTPSKQSNNKYAASSYLSLTPEQWKSHRSYSCQVTHEGSTVEKTVAPTECS

SEQ ID NO: 311 - protein, 214 aa, synthetic construct
  REGION 1..214: note = Synthetic polypeptide representing artificial human antibody VL chain
DIQMTQSPFSLSASVGDRVTITCRASQSISSYLNWYQQKPGKAPKLLIYAASSLQSGVPSRFSGSGSGTDFTLTISSLQPEDFATYYCHQSYSTSLTFGGGTKVEIKRTVAAPSVFIFPPSDEQLKSGTASVVCLLNNFYPREAKVQWKVDNALQSGNSQESVTEQDSKDSTYSLSSTLTLSKADYEKHKVYACEVTHQGLSSPVTKSFNRGEC

SEQ ID NO: 312 - protein, 214 aa, synthetic construct
  REGION 1..214: note = Synthetic polypeptide representing artificial human antibody VL chain
SYVLTQPPSVSVAPGKTARITCGGNNIGSKSVHWYQQKPGQAPVLVIYYDSDRPSGIPERFSGSNSGNTATLTISRVEAGDEADYYCQVWDSSSDHWVFGGGTKLTVLGQPKAAPSVTLFPPSSEELQANKATLVCLISDFYPGAVTVAWKADSSPVKAGVETTTPSKQSNNKYAASSYLSLTPEQWKSHKSYSCQVTHEGSTVEKTVAPTECS

SEQ ID NO: 313 - protein, 216 aa, synthetic construct
  REGION 1..216: note = Synthetic polypeptide representing artificial human antibody VL chain
QSALTQPASVSGSPGQSITISCTGTSSDVGGYNYVSWYQQHPGKAPKLMIYDVSNRPSGVSNRFSGSKSGNTASLTISGLQAEDEADYYCSSYTSSSTQVFGGGTKLTVLGQPKAAPSVTLFPPSSEELQANKATLVCLISDFYPGAVTVAWKADSSPVKAGVETTTPSKQSNNKYAASSYLSLTPEQWKSHRSYSCQVTHEGSTVEKTVAPTECS

SEQ ID NO: 314 - protein, 214 aa, synthetic construct
  REGION 1..214: note = Synthetic polypeptide representing artificial human antibody VL chain
DIQMTQSPSSLSASVGDRVTITCRASQSISSYLNWYQQKPGKAPKLLIYAASSLQSGVPSRFSGSGSGTDFTLTISSLQPEDFATYYCQQSYSTPKTFGQGTKVEIKRTVAAPSVFIFPPSDEQLKSGTASVVCLLNNFYPREAKVQWKVDNALQSGNSQESVTEQDSKDSTYSLSSTLTLSKADYEKHKVYACEVTHQGLSSPVTKSFNRGEW

SEQ ID NO: 315 - protein, 108 aa, synthetic construct
  REGION 1..108: note = Synthetic polypeptide representing artificial human antibody VL chain
AIQLTQSPSSLSASVGDRVILTCRASQGINSALAWYQQKPGKPPKLLIYAASSLESGVPSRFSGSGSGTDFTLTISNLQPEDFATYFCQQFNTYPLYTFGQGTKLDIT

SEQ ID NO: 316 - protein, 109 aa, synthetic construct
  REGION 1..109: note = Synthetic polypeptide representing artificial human antibody VL chain
VSSELTQDPAVSVALGQTVRITCQGDSLRRYYASWYQQKAGQAPILVIYGENNRPSGIPDRFSGSGSGNTASLTITGAQAEDEADYYCDSRDSSGNLVVFGGGTKLTVL

SEQ ID NO: 317 - protein, 214 aa, synthetic construct
  REGION 1..214: note = Synthetic polypeptide representing artificial human antibody VL chain
DIQMTQSPSSVPASVGDRVTITCRASQGIRNWLAWYRQRPGKAPELLIYAASNLQFGVPSRFSGSGSGTDFALTISSVQPEDFATYYCQQTNSFPRTFGPGTKVDIKRTVAAPSVFIFPPSDEQLKSGTASVVCLLNNFYPREAKVQWKVDNALQSGNSQESVTEQDSKDSTYSLSSTLTLSKADYEKHKVYACEVTHQGLSSPVTKSFNRGEW

SEQ ID NO: 318 - protein, 215 aa, synthetic construct
  REGION 1..215: note = Synthetic polypeptide representing artificial human antibody VL chain
DIQMTQSPSSLSASVGDRITITCRASQSVGTYLSWFQQKPGKAPKLLIYAASSLQSGVPSRFSGSGSGTDFTLTISSLQPEDFATYFCQQSYSVPPWTFGQGTKVEIKRTVAAPSVFIFPPSDEQLKSGTASVVCLLNNFYPREAKVQWKVDNALQSGNSQESVTEQDSKDSTYSLSSTLTLSKADYEKHKVYACEVTHQGLSSPVTKSFNRGEW

SEQ ID NO: 319 - protein, 216 aa, synthetic construct
  REGION 1..216: note = Synthetic polypeptide representing artificial human antibody VL chain
EVVLTQSPGTLSLSPGERATLSCRASQSVSSNYLAWYQQKLGQAPRLLIYGASSRATGIPDRFSGSGSGTDFTLTISRLEAEDFAVYYCQQYGSSPRYTFGQGTKVEIRRTVAAPSVFIFPPSDEQLKSGTASVVCLLNNFYPREAKVQWKVDNALQSGNSQESVTEQDSKDSTYSLSSTLTLSKADYEKHKLYACEVTHQGLSSPVTKSFNRGEW

SEQ ID NO: 320 - protein, 214 aa, synthetic construct
  REGION 1..214: note = Synthetic polypeptide representing artificial human antibody VL chain
EIVLTQSPGTLSLSPGERATLSCRASQSVSSRYLAWYQQKPGQAPRLLIHGASSRATGIPDRFSGSGSGTDFTLTISRLEPEDFAVYYCQQYGSAWTFGQGTKVEIKRTVAAPSVFIFPPSDEQLKSGTASVVCLLNNFYPREAKVQWKVDNALQSGNSQESVTEQDSKDSTYSLSSTLTLSKADYEKHKVYACEVTHQGLSSPVTKSFNRGEW

SEQ ID NO: 321 - protein, 215 aa, synthetic construct
  REGION 1..215: note = Synthetic polypeptide representing artificial human antibody VL chain
EIVLTQSPATLSLSPGERATLSCRASQSVGSSLAWYQQKPGQAPRLLIFDSSNRATAIPARFTGSGSGTDFTLTISSLEPEDFAVYYCQQRANWPPITFGQGTRLDIRRTVAAPSVFIFPPSDEQLKSGTASVVCLLNNFYPREAKVQWKVDNALQSGNSQESVTEQDSKDSTYSLSSTLTLSKADYEKHKVYACEVTHQGLSSPVTKSFNRGEC

SEQ ID NO: 322 - protein, 214 aa, synthetic construct
  REGION 1..214: note = Synthetic polypeptide representing artificial human antibody VL chain
DIQMTQSPSTLSASVGDRVTITCRASQSISSWLAWYQQKPGKAPKLVIYKASSLKSGVPSRFSGSGSGTEFTLTISSLQPDDFATYYCQQYNSYPWTFGQGTKVEIKRTVAAPSVFIFPPSDEQLKSGTASVVCLLNNFYPREAKVQWKVDNALQSGNSQESVTEQDSKDSTYSLSSTLTLSKADYEKHKVYACEVTHQGLSSPVTKSFNRGEW

SEQ ID NO: 323 - protein, 215 aa, synthetic construct
  REGION 1..215: note = Synthetic polypeptide representing artificial human antibody VL chain
PYVLTQPPSVSVAPGKTARITCGGNNIGSKSVHWYQQKPGQAPVLVIYYDSDRPSGIPERFSGSNSGNTATLTISRVEAGDEADYYCQVWDSSSDHYVVFGGGTKLTVLGQPKAAPSVTLFPPSSEELQANKATLVCLISDFYPGAVTVAWKADSSPVKAGVETTTPSKQSNNKYAASSYLSLTPEQWKSHRSYSCQVTHEGSTVEKTVAPTECS

SEQ ID NO: 324 - protein, 108 aa, synthetic construct
  REGION 1..108: note = Synthetic polypeptide representing artificial human antibody VL chain
EIVLTQSPATLSLSPGERATLSCRASQSVSTYLAWYQQKPGQAPRLLIYDASNRATGIPARFSGSGSGTDFTLTISSLEPEDFAVYYCQQRSNWPPLTFGGGTKVEIE

SEQ ID NO: 325 - protein, 219 aa, synthetic construct
  REGION 1..219: note = Synthetic polypeptide representing artificial human antibody VL chain
DIVMTQSPLSLPVTPGEPASISCRSSQSLLHSNGYNYLDWYVQKPGQSPQLLIYLGSNRASGVTDRLSGSGSGTDFTLEIGRVEAEDVGVYYCMQALQTPYTFGQGTKLEIRRTVAAPSVFIFPPSDEQLKSGTASVVCLLNNFYPREAKVQWKVDNALQSGNSQESVTEQDSKDSTYSLSSTLTLSKADYEKHKVYACEVTHQGLSSPVTKSFNRGEC

SEQ ID NO: 326 - protein, 213 aa, synthetic construct
  REGION 1..213: note = Synthetic polypeptide representing artificial human antibody VL chain
DIQMTQSPSTLSASVGDRVTITCRASQSISSWLAWYQQKPGKAPKLLIYKASSLESGVPSRFSGSGSGTEFTLTISSLQPDDFATYYCQQYNSYSTFGQGTKVEIKRTVAAPSVFIFPPSDEQLKSGTASVVCLLNNFYPREAKVQWKVDNALQSGNSQESVTEQDSKDSTYSLSSTLTLSKADYEKHKVYACEVTHQGLSSPVTKSFNRGEW

SEQ ID NO: 327 - protein, 110 aa, synthetic construct
  REGION 1..110: note = Synthetic polypeptide representing artificial human antibody VL chain
QTVVTQEPSVSVSPGGTVTLTCGLRSGSVSTGNYPSWYQQTPGQAPRTLIYNINTRSSGVPHRFSASIIDNRAALTITGAQSDDESLYYCLLYMGSGISVFGGGTKVTVL

SEQ ID NO: 328 - protein, 216 aa, synthetic construct
  REGION 1..216: note = Synthetic polypeptide representing artificial human antibody VL chain
EIVLTQSPGTLSSTLGERATLSCRASQSVSSSYLAWYQQKPGQAPRLLIYGASRRATGIPDRFSGSGSGTDFTLTISRLEPEDFAVYYCQHYGASPPWTFGQGTKVEIKRTVAAPSVFIFPPSDEQLKSGTASVVCLLNNFYPREAKVQWKVDNALQSGNSQESVTEQDSKDSTYSLSSTLTLSKADYEKHKVYACEVTHQGLSSPVTKSFNRGEC

SEQ ID NO: 329 - protein, 215 aa, synthetic construct
  REGION 1..215: note = Synthetic polypeptide representing artificial human antibody VL chain
PYVLTQPPSVSVAPGQTARITCGGNNIGSKSVHWYQQKPGQAPVMVVYADRERPSGIPERLSGSNFGNTATLTISRVEAGDEADYYCQVWDSNNDHREVFGGGTKLTVLGQPKAAPSVTLFPPSSEELQANKATLVCLISDFYPGAVTVAWKADSSPVKAGVETTTPSKQSNNKYAASSYLSLTPEQWKSHKSYSCQVTHEGSTVEKTVAPTECS

SEQ ID NO: 330 - protein, 214 aa, synthetic construct
  REGION 1..214: note = Synthetic polypeptide representing artificial human antibody VL chain
DIQMTQSPSTLSASVGDRVTITCRASQSISRWLAWYQQKPGKAPKLLIYKASALESGVPSRFSGSGSGTEFTLTISSLQPDDFATYYCQQYDSYPLSFGGGTKVEIKRTVAAPSVFIFPPSDEQLKSGTASVVCLLNNFYPREAKVQWKVDNALQSGNSQESVTEQDSKDSTYSLSSTLTLSKADYEKHKVYACEVTHQGLSSPVTKSFNRGEW

SEQ ID NO: 331 - protein, 214 aa, synthetic construct
  REGION 1..214: note = Synthetic polypeptide representing artificial human antibody VL chain
ATTLTQSPAFMSATPGDRVNISCKASQDIDDDMNWYQQKPGEAAIFIIQEATTLVPGVPPRFSGSGYGTDFTLTINNIESEDAAYYFCLQHDNFPYTFGQGTKLEIKRTVAAPSVFIFPPSDEQLKSGTASVVCLLNNFYPREAKVQWKVDNALQSGNSQESVTEQDSKDSTYSLSSTLTLSKADYEKHKVYACEVTHQGLSSPVTKSFNRGEW

SEQ ID NO: 332 - protein, 215 aa, synthetic construct
  REGION 1..215: note = Synthetic polypeptide representing artificial human antibody VL chain
EIVLTQSPGTLSLSPGERAILSCRAGQSIGAAYLAWYQQKPGQAPRLLISGASRRATGIPDRFSGSGSGTDFTLTISRLEPEDFAVYYCQQYGSSPLTFGGGTKVEIKRTVAAPSVFIFPPSDEQLKSGTASVVCLLNNFYPREAKVQWKVDNALQSGNSQESVTEQDSKDSTYSLSSTLTLSKADYEKHKVYACEVTHQGLSSPVTKSFNRGEC

SEQ ID NO: 333 - protein, 214 aa, synthetic construct
  REGION 1..214: note = Synthetic polypeptide representing artificial human antibody VL chain
LYELTQPPSVSVSPGQTARITCSGDALPKKYAYWYQQKSGQAPVLVIYEDSKRPSGIPERFSGSSSGTMATLTISGAQVEDEADYYCYSTDSSGNHGVFGGGTKLTVLGQPKAAPSVTLFPPSSEELQANKATLVCLISDFYPGAVTVAWKADSSPVKAGVETTTPSKQSNNKYAASSYLSLTPEQWKSHKSYSCQVTHEGSTVEKTVAPTECS

SEQ ID NO: 334 - protein, 219 aa, synthetic construct
  REGION 1..219: note = Synthetic polypeptide representing artificial human antibody VL chain
DIVMTQSPLSLPVTPGEPASISCRSSQSLLHSDGYNYLDWYLQKPGQSPQLLIYLGSNRASGVPDRFSGSGSGTDFTLKISRVEAEDVGVYYCMQALQTPNTFGQGTKLEIKRTVAAPSVFIFPPSDEQLKSGTASVVCLLNNFYPREAKVQWKVDNALQSGNSQESVTEQDSKDSTYSLSSTLTLSKADYEKHKVYACEVTHQGLSSPVTKSFNRGEC

SEQ ID NO: 335 - protein, 217 aa, synthetic construct
  REGION 1..217: note = Synthetic polypeptide representing artificial human antibody VL chain
QSALTQPASVSGSPGQSITISCTGTSSDVGGYNYVSWYQHHPDKAPKLIIYEVKNRPSGVSNRFSGSKSDNTASLTISGLQAEDEADYYCNSYSSSSTLYVFGTGTKVTVLSQPKANPTVTLFPPSSEELQANKATLVCLISDFYPGAVTVAWKADSSPVKAGVETTKPSKQSNNKYAASSYLSLTPEQWKSHRSYSCQVTHEGSTVEKTVAPTECS

SEQ ID NO: 336 - protein, 215 aa, synthetic construct
  REGION 1..215: note = Synthetic polypeptide representing artificial human antibody VL chain
EIVLTQSPATLSLSPGERATLSCRASQSISSNLAWYQQKPGQAPRLLIYDASNRATGIPARFSGSGSGTDFTLTISSLEPEDFAVYYCQQHSNWPELTFGGGTKVEIKRTVAAPSVFIFPPSDEQLKSGTASVVCLLNNFYPREAKVQWKVDNALQSGNSQESVTEQDSKDSTYSLSSTLTLSKADYEKHKVYACEVTHQGLSSPVTKSFNRGEC

SEQ ID NO: 337 - protein, 216 aa, synthetic construct
  REGION 1..216: note = Synthetic polypeptide representing artificial human antibody VL chain
ASALTQPASVSGSPGQSITISCTGTSSDVGGYNYVSWYQQHPGKAPKLMIYDVSNRPSGVSNRFSGSKSGNTASLTISGLQAEDEADYYCSSYRSSGVYVFGTGTKVTVLGQPKANPTVTLFPPSSEELQANKATLVCLISDFYPGAVTVAWKADGSPVKAGVETTKPSKQSNNKYAASSYLSLTPEQWKSHRSYSCQVTHEGSTVEKTVAPTECS

SEQ ID NO: 338 - protein, 219 aa, synthetic construct
  REGION 1..219: note = Synthetic polypeptide representing artificial human antibody VL chain
QVVMTQTPLSLSVTPGQPASISCKSSQRLLHSDGKTYLYWYLQKPGQSPQLLIYEVSNRFSGVPDRFSGSGSGTDFTLKISRVEAADVGVYYCMQSIHLPYTFGQGTKLEIKRTVAAPSVFIFPPSDEQLKSGTASVVCLLNNFYPREAKVQWKVDNALQSGNSQESVTEQDSKDSTYSLSSTLTLSKADYEKHKVYACEVTHQGLSSPVTKSFNRGEW

SEQ ID NO: 339 - protein, 216 aa, synthetic construct
  REGION 1..216: note = Synthetic polypeptide representing artificial human antibody VL chain
EIVLTQSPGTLSLSPGERATLSCRASQSVSSSFLAWYQQKPGQAPRLLIYGASSRATGVADRFSGSGSGTDFTLTINRLEPEDFAVYYCHQYGGSPPNTFGQGTKVEIKRTVAAPSVFIFPPSDEQLKSGTASVVCLLNNFYPREAKVQWKVDNALQSGNSQESVTEQDSKDSTYSLSSTLTLSKADYEKHKVYACEVTHQGLSSPVTKSFNRGEC

SEQ ID NO: 340 - protein, 215 aa, synthetic construct
  REGION 1..215: note = Synthetic polypeptide representing artificial human antibody VL chain
DIQLTQSPSFLSASVGDRVTITCRASQDVDTYLAWYQQKPGKAPKLLIYAASTLHSGVPSRFSGSGAGTEFTLTISSLQPEDFATYYCQQLNSYPPLTFGGGTKVEIKRTVAAPSVFIFPPSDEQLKSGTASVVCLLNNFYPREAKVQWKVDNALQSGNSQESVTEQDSKDSTYSLSSTLTLSKADYEKHKVYACEVTHQGLSSPVTKSFNRGEC

SEQ ID NO: 341 - protein, 216 aa, synthetic construct
  REGION 1..216: note = Synthetic polypeptide representing artificial human antibody VL chain
QSVLTQPPSLSAAPGQKVIISCSGSSSNIGKYSVFWYQQVPGTGPKLLIFDNNRRPSGIRDRFSASKSGTSATLEITGLQTGDEAHYYCATWDSSLTAGVFGGGTKLTVLRQPKAAPSVTLFPPSSEELQANKATLVCLISDFYPGAVTVAWKADGSPVKAGVETTTPSKQSNNKYAASSYLSLTPEQWKSHKSYSCQVTHEGSTVEKTVAPTECS

SEQ ID NO: 342 - protein, 214 aa, synthetic construct
  REGION 1..214: note = Synthetic polypeptide representing artificial human antibody VL chain
EIVLTQSPATLSLSPGNRAALSCRASQSVGSSLHWYQQKPGQAPRLLIYDVSNRAAGIPGRFSASGSGTDFTLTISNLEPEDFAVYYCQQRSAWPITFGQGTRLEIKRTVAAPSVFIFPPSDEQLKSGTASVVCLLNNFYPREAKVQWKVDNALQSGNSQESVTEQDSKDSTYSLSSTLTLSKADYEKHKVYACEVTHQGLSSPVTKSFNRGEC

SEQ ID NO: 343 - protein, 216 aa, synthetic construct
  REGION 1..216: note = Synthetic polypeptide representing artificial human antibody VL chain
EIVLTQSPGTLSLSPGERATLSCRASQSVSSSYLAWYQQKPGQAPRLLISGASSRATGIPDRFSGSGSGTDFTLTISRLEPEDFAVYYCQQYGSSRKLTFGGGTKVEIKRTVAAPSVFIFPPSDEQLKSGTASVVCLLNNFYPREAKVQWKVDNALQSGNSQESVTEQDSKDSTYSLSSTLTLSKADYEKHKVYACEVTHQGLSSPVTKSFNRGEC

SEQ ID NO: 344 - protein, 107 aa, synthetic construct
  REGION 1..107: note = Synthetic polypeptide representing artificial human antibody VL chain
DIQMTQSPSTLSASVGDRVTITCRASQSISVWLAWYQQKPGKAPKLLIYKASTLEAGVPSRFSGSGSGTEFSLTISGLQPDDFGTYFCQHYDSYPWTFGQGTKVEMK

SEQ ID NO: 345 - protein, 215 aa, synthetic construct
  REGION 1..215: note = Synthetic polypeptide representing artificial human antibody VL chain
VSSELTQDPAVSVALGQTVRITCQGDSLRRYYVSWYRQKPGEAPVVVIYGKNNRPSWIPDRLSGSSSGNTASLTITGAQAEDEADYYCCSRDSSGNPWVFGGGTKLTVLGQPKAAPSVTLFPPSSEELQANKATLVCLISDFYPGAVTVAWKADSSPVKAGVETTTPSKQSNNKYAASSYLSLTPEQWKSHKSYSCQVTHEGSTVEKTVAPTECS

SEQ ID NO: 346 - protein, 214 aa, synthetic construct
  REGION 1..214: note = Synthetic polypeptide representing artificial human antibody VL chain
VIQMTQSPTSLSASVGDRVTITCRASQSISSYLNWYQQKLGKAPKLLIYAASSLQSGVPSRFSGSGSGTDFTLTISSLQPEDFATYYCQQSYSTSLTFGGGTKVEIKRTVAAPSVFIFPPSDEQLKSGTASVVCLLNNFYPREAKVQWKVDNALQSGNSQESVTEQDSKDSTYSLSSTLTLSKADYEKHKVYACEVTHQGLSSPVTKSFNRGEC

SEQ ID NO: 347 - protein, 217 aa, synthetic construct
  REGION 1..217: note = Synthetic polypeptide representing artificial human antibody VL chain
EIVLTQSPGTLSLSPGERATLSCRASQSVSSSYLAWYQQKPGQAPRLLIYDASSRAAGVPDRFSGSGSGTDFTLTISRLEPEDFAVYFCQQYDSSPPMYTFGQGTKLEIRRTVAAPSVFIFPPSDEQLKSGTASVVCLLNNFYPREAKVQWKVDNALQSGNSQESVTEQDSKDSTYSLSSTLTLSKADYEKHKVYACEVTHQGLSSPVTKSFNRGEC

SEQ ID NO: 348 - protein, 217 aa, synthetic construct
  REGION 1..217: note = Synthetic polypeptide representing artificial human antibody VL chain
PSVLTQPPSVSAAPGQKVTISCSGSSSNIDNNYVSWYQQLPGTAPKLLIYENNKRASGIPDRFSGSKSGTSATLGITGLQTGDEADYYCGTWDSSLSPGGVFGGGTKLTVLGQPKAAPSVTLFPPSSEELQANKATLVCLISDFYPGAVTVAWKADSSPVKAGVETTTPSKQSNNKYAASSYLSLTPEQWKSHRSYSCQVTHEGSTVEKTVAPTECS

SEQ ID NO: 349 - protein, 213 aa, synthetic construct
  REGION 1..213: note = Synthetic polypeptide representing artificial human antibody VL chain
DIQMTQSPSSLSASVGDRVTITCRASQTISTYLNWYQQKPGKAPKLLIYAASSLQSGVPSRFSGSGSETDFTLTISSLQPEDFATYYCQQSYNARTFGQGTKVEIKRTVAAPSVFIFPPSDEQLKSGTASVVCLLNNFYPREAKVQWKVDNALQSGNSQESVTEQDSKDSTYSLSSTLTLSKADYEKHKVYACEVTHQGLSSPVTKSFNRGEC

SEQ ID NO: 350 - protein, 221 aa, synthetic construct
  REGION 1..221: note = Synthetic polypeptide representing artificial human antibody VL chain
DIVMTQSPDSLAVSLGERATINCKSSQTVLHSSNNRNYLAWYQHKPGQPPKLLIYWASTRESGVPDRFSGSGSGTDFTLTINSLQAEDVAVYYCQQYYDTAPLTFGGGTKVEIKRTVAAPSVFIFPPSDEQLKSGTASVVCLLNNFYPREAKVQWKVDNALQSGNSQESVTEQDSKDSTYSLSSTLTLSKADYEKHKVYACEVTHQGLSSPVTKSFNRGEC

SEQ ID NO: 351 - protein, 214 aa, synthetic construct
  REGION 1..214: note = Synthetic polypeptide representing artificial human antibody VL chain
EIVMTQSPATLSVSPGERATLSCRASQSVDGNLAWYQQKPGQAPRLLIFDASTRATTIPVRFSGSGSGTEFTLTISSLQSEDFAVYYCQQYSKWPITFGQGTRLEIKRTVAAPSVFIFPPSDEQLKSGTASVVCLLNNFYPREAKVQWKVDNALQSGNSQESVTEQDSKDSTYSLSSTLTLSKADYEKHKLYACEVTHQGLSSPVTKSFNRGEC

SEQ ID NO: 352 - protein, 214 aa, synthetic construct
  REGION 1..214: note = Synthetic polypeptide representing artificial human antibody VL chain
DIQMTQSPSSLSASLGDRITITCRATQSISNYLNWYQQKSGKVPELLIYAASHLQSGVPSRFSGTGSGTDFSLTISGLQPEDFATYYCQQTYTTPRTFGRGTTVEIRRTVAAPSVFIFPPSDEQLKSGTASVVCLLNNFYPREAKVQWKVDNALQSGNSQESVTEQDSKDSTYSLSSTLTLSKADYEKHKVYACEVTHQGLSSPVTKSFNRGEC

SEQ ID NO: 353 - protein, 217 aa, synthetic construct
  REGION 1..217: note = Synthetic polypeptide representing artificial human antibody VL chain
PSVLTQPPSVSGAPGQRVTISCTGSSSNIGAGYDVHWYQQLPGTAPKLLIYGNINRPSGVPDRFSGSKSGPSASLTITGLQADDEADYYCQSYDSRLSGVVFGGGTKLTVLGQPKAAPSVTLFPPSSEELQANKATLVCLISDFYPGAVTVAWKADSSPVKAGVETTTPSKQSNNKYAASSYLSLTPEQWKSHRSYSCQVTHEGSTVEKTVAPTECS

SEQ ID NO: 354 - protein, 214 aa, synthetic construct
  REGION 1..214: note = Synthetic polypeptide representing artificial human antibody VL chain
EIVMTQSPATLSVSPGERATLSCRASQSVSTNLAWYQQRPGQAPRLFIFGASTRATGIPARFSGSGSGTEFTLTISSPQPEDSAVYYCQQYTTRPLTFGGGTKVEIKRTVAAPSVFIFPPSDEQLKSGTASVVCLLNNFYPREAKVQWKVDNALQSGNSQESVTEQDSKDSTYSLSSTLTLSKADYEKHKVYACEVTHQGLSSPVTKSFNRGEC

SEQ ID NO: 355 - protein, 214 aa, synthetic construct
  REGION 1..214: note = Synthetic polypeptide representing artificial human antibody VL chain
EIVLTQSPATLSLSPGEGATLSCRASQSVSGYLAWYQQKPGQAPRLLIYDASNRATGIPARFSGSGSGTDFTLTISSLEPEDFAVYYCQQRSKWPLTFGGGTQVEIKRTVAAPSVFIFPPSDEQLKSGTASVVCLLNNFYPREAKVQWKVDNALQSGNSQESVTEQDSKDSTYSLSSTLTLSKADYEKHKLYACEVTHQGLSSPVTKSFNRGEC

SEQ ID NO: 356 - protein, 217 aa, synthetic construct
  REGION 1..217: note = Synthetic polypeptide representing artificial human antibody VL chain
QSVVTQPPSASGPPGQTVTISCSGGRSNVASHAVHWYQHLPGTAPKLLIYNDHQRPSGVPDRFSGSKSGPSASLAISGLRSEDEADYYCATWDDSLGGRVVFGGGTKLTVLGQPKAAPSVTLFPPSSEELQANKATLVCLISDFYPGAVTVAWKADSSPVKAGVETTTPSKQSNNKYAASSYLSLTPEQWKSHRSYSCQVTHEGSTVEKTVAPTECS

SEQ ID NO: 357 - protein, 220 aa, synthetic construct
  REGION 1..220: note = Synthetic polypeptide representing artificial human antibody VL chain
DIVMTQTPLSMPVTPGEPASISCRSSQSLLDSDDGKTYLDWYLQKPGQSPQLLIYTVSYRASGVPDRFSGSGSGTDFTLKISRVEAEDVGVYYCMQRIEFPFTFGPGTKVDIKRTVAAPSVFIFPPSDEQLKSGTASVVCLLNNFYPREAKVQWKVDNALQSGNSQESVTEQDSKDSTYSLSSTLTLSKADYEKHKVYACEVTHQGLSSPVTKSFNRGEC

SEQ ID NO: 358 - protein, 106 aa, synthetic construct
  REGION 1..106: note = Synthetic polypeptide representing artificial human antibody VL chain
SYELTQPPSVSVSPGQTASITCSGDKLGDKYACWYQQKPGQSPVLVIYQDSKRPSGIPERFSGSNSGNTATLTISGTQAMDEADYYCQAWDSSTAVFGGGTKLTVL

SEQ ID NO: 359 - protein, 212 aa, synthetic construct
  REGION 1..212: note = Synthetic polypeptide representing artificial human antibody VL chain
PYELTQPPSVSVSPGQTANITCSGDKLGDICVCWYQQKPGQSPVLVIYQHNKRPSGIPERFSGSNSGNTATLTISATQATDEAIYYCQSWDSSSVLFGGGTKLTVLGQPKAAPSVTLFPPSSEELQANKATLVCLISDFYPGAVTVAWKADSSPVKAGVETTTPSKQSNNKYAASSYLSLTPEQWKSHRSYSCQVTHEGSTVEKTVAPTECS

SEQ ID NO: 360 - protein, 220 aa, synthetic construct
  REGION 1..220: note = Synthetic polypeptide representing artificial human antibody VL chain
GIVMTQSPDSLGVSLGERATINCKSSQSLFYSSNNKNYLAWYQQKPGQPPKLLIYWASTRESGVPDRFSGSGSGTDFTLTISSLQAEDVAVYYCQQYYGRLFTFGPGTKVDIRRTVAAPSVFIFPPSDEQLKSGTASVVCLLNNFYPREAKVQWKVDNALQSGNSQESVTEQDSKDSTYSLSSTLTLSKADYEKHKVYACEVTHQGLSSPVTKSFNRGEC

SEQ ID NO: 361 - protein, 216 aa, synthetic construct
  REGION 1..216: note = Synthetic polypeptide representing artificial human antibody VL chain
QIVLTQSPATLSLSPGERATLSCRASQSVSSYLAWYQQKPGQAPRLLIYDASNRATGIPARFSGGGSETDFTLTISSLEPEDFAVYYCQQRSNWPPRLPFGGGTKVEIKRTVAAPSVFIFPPSDEQLKSGTASVVCLLNNFYPREAKVQWKVDNALQSGNSQESVTEQDSKDSTYSLSSTLTLSKADYEKHKVYACEVTHQGLSSPVTKSFNRGEC

SEQ ID NO: 362 - protein, 215 aa, synthetic construct
  REGION 1..215: note = Synthetic polypeptide representing artificial human antibody VL chain
QIVLTQSPATLSLSPGERATLSCRASQSVSNYLAWYQQKPGQAPRLLIYDASNRATGIPARFSGSGSGTDFTLTISSLEPEDFAVYYCQQRSNWPPYTFGQGTKLDIKRTVAAPSVFIFPPSDEQLKSGTASVVCLLNNFYPREAKVQWKVDNALQSGNSQESVTEQDSKDSTYSLSSTLTLSKADYEKHKVYACEVTHQGLSSPVTKSFNRGEC

SEQ ID NO: 363 - protein, 219 aa, synthetic construct
  REGION 1..219: note = Synthetic polypeptide representing artificial human antibody VL chain
DIVMTQSPLSLPVTPGEPASISCRSSQSLLQSNGNNYLAWYLQKPGQSPQLLIYLGSNRASGVPDRFSGSGSGTDFTLKISKLAAEDVGVYYCMQALQTPYTFGQGTKLDIKRTVAAPSVFIFPPSDEQLKSGTASVVCLLNNFYPREAKVQWKVDNALQSGNSQESVTEQDSKDSTYSLSSTLTLSKADYEKHKVYACEVTHQGLSSPVTKSFNRGEC

SEQ ID NO: 364 - protein, 214 aa, synthetic construct
  REGION 1..214: note = Synthetic polypeptide representing artificial human antibody VL chain
DIQMTQSPSTLSASVGDRVTITCRASQSISGWLAWYQQKPGKAPQLLIYLVSSLESGVPSRFSGSGSGTEFTLTISSLQPDDFATYYCQHYDSYIGTFGQGTKVEIKRTVAAPSVFIFPPSDEQLKSGTASVVCLLNNFYPREAKVQWKVDNALQSGNSQESVTEQDSKDSTYSLSSTLTLSKADYEKHKLYACEVTHQGLSSPVTKSFNRGEC

SEQ ID NO: 365 - protein, 216 aa, synthetic construct
  REGION 1..216: note = Synthetic polypeptide representing artificial human antibody VL chain
QSVLTQPPSVSAAPGQKVTISCSGGSSNIGNNYVSWYQQLPGTAPKLIIYDNDKRPAGIPDRFSGSKSGSSATLGITGLQNGDEAEYYCGTWDSSLGGGVFGGGTKVTVLGQPKAAPSVTLFPPSSEELQANKATLVCLISDFYPGAVTVAWKADSSPVKAGVETTTPSKQSNNKYAASSYLSLTPEQWKSHRSYSCQVTHEGSTVEKTVAPTECS

SEQ ID NO: 366 - protein, 215 aa, synthetic construct; identical to SEQ ID NO: 362
  REGION 1..215: note = Synthetic polypeptide representing artificial human antibody VL chain

SEQ ID NO: 367 - protein, 112 aa, synthetic construct
  REGION 1..112: note = Synthetic polypeptide representing artificial human antibody VL chain
GIVMTQSPLSLPVTPGETASISCRSSQSLLRRDGNNYLEWYLQKPGQPPHLLIYLGSIRASRVPDRFSGTGSGTDFTLIISRVEADDVGVYYCMEAEQTPGTFGQGTKLEIK

SEQ ID NO: 368 - protein, 216 aa, synthetic construct
  REGION 1..216: note = Synthetic polypeptide representing artificial human antibody VL chain
QSALTQPASVSGSPGQSITISCTGTSSDVGGFNYVSWYQQHPGKAPKLLIYDVSERPSGVSSRFSGSKSGNTASLTISGLQAEDEADYYCSSYTSSTTVLFGGGTKLTVLGQPKAAPSVTLFPPSSEELQANKATLVCLISDFYPGAVTVAWKADSSPVKAGVETTTPSKQSNNKYAASSYLSLTPEQWKSHRSYSCQVTHEGSTVEKTVAPTECS

SEQ ID NO: 369 - protein, 220 aa, synthetic construct
  REGION 1..220: note = Synthetic polypeptide representing artificial human antibody VL chain
GVVMTQSPLSLPVTLGQPASISCRSSQSLVYSDGNTYLNWFQQRPGQSPRRLIYKVSNRDSGVPDRFSGSGSGTDFTLKISRVEAEDVGVYYCMQGTHWPPITFGQGTRLEIKRTVAAPSVFIFPPSDEQLKSGTASVVCLLNNFYPREAKVQWKVDNALQSGNSQESVTEQDSKDSTYSLSSTLTLSKADYEKHKVYACEVTHQGLSSPVTKSFNRGEC

SEQ ID NO: 370 - protein, 214 aa, synthetic construct
  REGION 1..214: note = Synthetic polypeptide representing artificial human antibody VL chain
DIQMTQSPSSLSASVGDRVTITCRASQSISSYLNWYQQKPGKAPKLLIYAASSLQSGVPSRFSGSGSGTDFTLAISSLQPEDFATYYCHQTYSTRLTFGGGTEVEIKRTVAAPSVFIFPPSDEQLKSGTASVVCLLNNFYPREAKVQWKVDNALQSGNSQESVTEQDSKDSTYSLSSTLTLSKADYEKHKVYACEVTHQGLSSPVTKSFNRGEC

SEQ ID NO: 371 - protein, 214 aa, synthetic construct
  REGION 1..214: note = Synthetic polypeptide representing artificial human antibody VL chain
DIQMTQSPSSLSASVGDRVTITCQASQDISNYLNWYQQKPGKAPKLLIYDASNLETGVPSRFSGSGSGTDFTLTISSLQPEDFATYYCQQYDNLPLTFGGGTKVEIKRTVAAPSVFIFPPSDEQLKSGTASVVCLLNNFYPREAKVQWKVDNALQSGNSQESVTEQDSKDSTYSLSSTLTLSKADYEKHKVYACEVTHQGLSSPVTKSFNRGEC

SEQ ID NO: 372 - protein, 214 aa, synthetic construct
  REGION 1..214: note = Synthetic polypeptide representing artificial human antibody VL chain
SYVLTQPPSVSVAPGQTARITCGGNNIGSKSVHWYQQKPGQAPVLVVYDDSDRPSGIPERFSGSNSGNTATLTISRVEAGDEADYYCQVWDSSSDPWVFGGGTKLTVLGQPKAAPSVTLFPPSSEELQANKATLVCLISDFYPGAVTVAWKADSSPVKAGVETTTPSKQSNNKYAASSYLSLTPEQWKSHKSYSCQVTHEGSTVEKTVAPTECS

SEQ ID NO: 373 - protein, 215 aa, synthetic construct
  REGION 1..215: note = Synthetic polypeptide representing artificial human antibody VL chain
DIQLTQSPSFLSASVGDRVTITCRASQVISDYVAWYQQKPGKAPKLLIYAASTLQSGVPSRFSGSGSGTEFTLTISSLQSEDFATYYCQQLNSYPPVTFGQGTRLDIKRTVAAPSVFIFPPSDEQLKSGTASVVCLLNNFYPREAKVQWKVDNALQSGNSQESVTEQDSKDSTYSLSSTLTLSKADYEKHKVYACEVTHQGLSSPVTKSFNRGEC

SEQ ID NO: 374 - protein, 214 aa, synthetic construct
  REGION 1..214: note = Synthetic polypeptide representing artificial human antibody VL chain
DIQMTQSPSSLSASVGDRVTITCRASQSISTYLNWYQQKPGKAPKLLIYVASSLQSGVPSRFSGSGSGTDFTLTISGLQPEDFATYYCQQSYSTPYTFGQGTKLEIKRTVAAPSVFIFPPSDEQLKSGTASVVCLLNNFYPREAKVQWKVDNALQSGNSQESVTEQDSKDSTYSLSSTLTLSKADYEKHKVYACEVTHQGLSSPVTKSFNRGEC

SEQ ID NO: 375 - protein, 215 aa, synthetic construct
  REGION 1..215: note = Synthetic polypeptide representing artificial human antibody VL chain
DIQMTQSPSTLSASVGDRVTITCRASQRISNWLAWYQQTPGKAPKLLIYKASSLESGVPSRFSGSGSGTEFTLTISSLQPDDFATYYCQQYSSSSPRTFGQGTKVEIKRTVAAPSVFIFPPSDEQLKSGTASVVCLLNNFYPREAKVQWKVDNALQSGNSQESVTEQDSKDSTYSLSSTLTLSKADYEKHKVYACEVTHQGLSSPVTKSFNRGEC

SEQ ID NO: 376 - protein, 112 aa, synthetic construct
  REGION 1..112: note = Synthetic polypeptide representing artificial human antibody VL chain
DILMTQTPLSLSVTPGQPASISCKSSQSLLNPDGKTYLYWYLQKSGQPPQLLIYELSNRFSGVPDRFSGSGSGTDFTLKISRVEAEDIGVYFCMQSLQLPITFGQGTRLEIK

SEQ ID NO: 377 - protein, 215 aa, synthetic construct
  REGION 1..215: note = Synthetic polypeptide representing artificial human antibody VL chain
DIQMTQSPSSLSASVGDRVTITCRASQSISGYLNWYQQKPGKAPKLLIYAASSLQSGVPSRFSGSGSGTDFTLTISSLQPEDFATYYCQQSYSTRLLTFGPGTKVDIKRTVAAPSVFIFPPSDEQLKSGTASVVCLLNNFYPREAKVQWKVDNALQSGNSQESVTEQDSKDSTYSLSSTLTLSKADYEKHKVYACEVTHQGLSSPVTKSFNRGEC

SEQ ID NO: 378 - protein, 217 aa, synthetic construct
  REGION 1..217: note = Synthetic polypeptide representing artificial human antibody VL chain
QSVLTQPPSVSGAPGQRVTISCTGSSSNVGADYDVHWYQQLPGTAPKLLIYGNRNRPSGVPDRFSGSKSGTSASLAITGLQAEDEADYYCQSFDSSLRGYVFGTGTKVTVLGQPKANPTVTLFPPSSEELQANKATLVCLISDFYPGAVTVAWKADGSPVKAGVETTKPSKQSNNKYAASSYLSLTPEQWKSHRSYSCQVTHEGSTVEKTVAPTECS

SEQ ID NO: 379 - protein, 216 aa, synthetic construct
  REGION 1..216: note = Synthetic polypeptide representing artificial human antibody VL chain
EIVLTQSPDTLSLSPGERATLSCRASQSVSSSLAWYQQKPGQAPRLLIYYASNRATDIPARFSGSGSGTDFTLTISSLEPEDFALYYCQHRITWPPLITFGQGTRLEIKRTVAAPSVFIFPPSDEQLKSGTASVVCLLNNFYPREAKVQWKVDNALQSGNSQESVTEQDSKDSTYSLSSTLTLSKADYEKHKVYACEVTHQGLSSPVTKSFNRGEC

SEQ ID NO: 380 - protein, 215 aa, synthetic construct
  REGION 1..215: note = Synthetic polypeptide representing artificial human antibody VL chain
EIVLTQSPGTLSLSPGERATLSCRASQSFDGKSLAWYQQKPGQTPRLLVYGASSRATGIPDRFGGSGSGTDFTLTISRLESEDFAVYFCQQYAYVPITFGQGTRLERKRTVAAPSVFIFPPSDEQLKSGTASVVCLLNNFYPREAKVQWKVDNALQSGNSQESVTEQDSKDSTYSLSSTLTLSKADYEKHKVYACEVTHQGLSSPVTKSFNRGEC

SEQ ID NO: 381 - protein, 220 aa, synthetic construct
  REGION 1..220: note = Synthetic polypeptide representing artificial human antibody VL chain
GIVMTQSPDSLAVSLGERATINCKSSQSILYSSNNKDSLAWYQQKPGQPPKLLISSASTRQSGVPDRFSGSGSGTDFTLTISSLQAEDVAVYYCQQYYSIPLTFGPGTKVDIKRTVAAPSVFIFPPSDEQLKSGTASVVCLLNNFYPREAKVQWKVDNALQSGNSQESVTEQDSKDSTYSLSSTLTLSKADYEKHKVYACEVTHQGLSSPVTKSFNRGEW

SEQ ID NO: 382 - protein, 108 aa, synthetic construct
  REGION 1..108: note = Synthetic polypeptide representing artificial human antibody VL chain
EIVLTQSPGTLSLSLGERATLSCRASQSVSGSHLAWYQQKPGQAPRLLIYDASSRATGIPDRFSGSGSGTEFTLTISRLEPEDFAVYYCQQYGSSPLWFGQGTKVEIK

SEQ ID NO: 383 - protein, 216 aa, synthetic construct
  REGION 1..216: note = Synthetic polypeptide representing artificial human antibody VL chain
QSALTQPASVSGSPGQSITISCTGTSSDVGGYNYVSWYQQHPGKAPKLMIYDVSNRPSGVSNRFSGSKSGNTASLTISGLQAEDEADYYCSSYTSSSTQVFGTGTKVTVLGQPKANPTVTLFPPSSEELQANKATLVCLISDFYPGAVTVAWKADGSPVKAGVETTKPSKQSNNKYAASSYLSLTPEQWKSHRSYSCQVTHEGSTVEKTVAPTECS

SEQ ID NO: 384 - protein, 214 aa, synthetic construct
  REGION 1..214: note = Synthetic polypeptide representing artificial human antibody VL chain
PYELTQPPSVSVSPGQTARITCSGDALPKKYAYWYQQKSGQAPVLVIYEDSKRPSGIPERFSGSSSGTMATLTISGAQVEDEADYYCYSTDSSGNHRVFGGGTKLTVLGQPKAAPSVTLFPPSSEELQANKATLVCLISDFYPGAVTVAWKADSSPVKAGVETTTPSKQSNNKYAASSYLSLTPEQWKSHKSYSCQVTHEGSTVEKTVAPTECS

SEQ ID NO: 385 - protein, 215 aa, synthetic construct
  REGION 1..215: note = Synthetic polypeptide representing artificial human antibody VL chain
EIVMTQSPATLSVSPGETATLSCRASQSVSSNLAWYQQKPGQAPRLLMYGASTRATSVPARFSGSASGTDFTLTISSLQSEDFALYYCQQYNNWPQYTFGQGTKLEIKRTVAAPSVFIFPPSDEQLKSGTASVVCLLNNFYPREAKVQWKVDNALQSGNSQESVTEQDSKDSTYSLSSTLTLSKADYEKHKVYACEVTHQGLSSPVTKSFNRGEW

SEQ ID NO: 386 - protein, 217 aa, synthetic construct
  REGION 1..217: note = Synthetic polypeptide representing artificial human antibody VL chain
EIVLTQSPGTLSLSPGERATLSCRASQSVSSSYLVWYQQKAGQAPRLLIYGASSRATGISDRFSGSGSGTDFTLTISRLEPEDFAVYYCQHFRSSPPTYTFGQGTKLEIKRTVAAPSVFIFPPSDEQLKSGTASVVCLLNNFYPREAKVQWKVDNALQSGNSQESVTEQDSKDSTYSLSSTLTLSKADYEKHKVYACEVTHQGLSSPVTKSFNRGEC

SEQ ID NO: 387 - protein, 216 aa, synthetic construct
  REGION 1..216: note = Synthetic polypeptide representing artificial human antibody VL chain
QSALTQPASVSGSPGQSITISCTGTSSDVGLYNFVSWYQQHPGKAPKLMIFDVNNRPSGVSNRFSGSKSDNTASLTISGLQAEDEADYYCSSYSRTTTLVFGGGTKVTVLGQPKAAPSVTLFPPSSEELQANKATLVCLISDFYPGAVTVAWKADSSPIKAGVETTTPSKQSNNKYAASSYLSLTPEQWKSHRSYSCQVTHEGSTVEKTVAPTECS

SEQ ID NO: 388 - protein, 218 aa, synthetic construct
  REGION 1..218: note = Synthetic polypeptide representing artificial human antibody VL chain
PAVLTQPPSVSGAPGQRVTISCTGSNSNIGAGYYVHWYQHRPGAAPKRLIYADSDRPSGVPDRFSGSRSGTSASLAITGLQAEDEADYYCQSYDSGLSAPWVFGGGTKLTVLGQPKAAPSVTLFPPSSEELQANKATLVCLISDFYPGAVTVAWKADSSPVKAGVETTTPSKQSNNKYAASSYLSLTPEQWKSHKSYSCQVTHEGSTVEKTVAPTECS

SEQ ID NO: 389 - protein, 215 aa, synthetic construct
  REGION 1..215: note = Synthetic polypeptide representing artificial human antibody VL chain
EIVLTQSPGTLSLSPGQRATLSCRASQSVTSSYLAWYQQKPGQAPRLLIYAASSRATGTPDRFSGSGSGTDFTLTISRLEPEDFAVYSCQQYGNSPPTFGGGTKVEIKRTVAAPSVFIFPPSDEQLKSGTASVVCLLNNFYPREAKVQWKVDNALQSGNSQESVTEQDSKDSTYSLSSTLTLSKADYEKHKVYACEVTHQGLSSPVTKSFNRGEC

SEQ ID NO: 390 - protein, 110 aa, synthetic construct
  REGION 1..110: note = Synthetic polypeptide representing artificial human antibody VL chain
PSVLTQPLSASGTPGQRVTISCSGSSSNIGDNFVYWYQQFPGTAPKVLIFKNNQRPSGVPDRFFGSKSGTSASLAISGLRSEDEAEYYCATWDDDLSGPVFGGGTKVTVL

SEQ ID NO: 391 - protein, 107 aa, synthetic construct
  REGION 1..107: note = Synthetic polypeptide representing artificial human antibody VL chain
ETTLMQSPALISATPGDKVHISCKASQDIDDDLNWYQQKPGEAPILIIEEATNLGPGFSPRFSGSGYGTDFTLTIYDIESGDAAFYFCLQHDTFPLTFGQGTKVEIK

SEQ ID NO: 392 - protein, 214 aa, synthetic construct
  REGION 1..214: note = Synthetic polypeptide representing artificial human antibody VL chain
DIQMTQSPSTLSASVGDKVTITCRASQSVGSWLAWYQQKPGKAPKLLISVASSLESGVPSRFSGSGSGTEFTLTVSSLQPDDFATYYCQQYNSYSWTFGQGTKVELKRTVAAPSVFIFPPSDEQLKSGTASVVCLLNNFYPREAKVQWKVDNALQSGNSQESVTEQDSKDSTYSLSSTLTLSKADYEKHKVYACEVTHQGLSSPVTKSFNRGEL

SEQ ID NO: 393 - protein, 214 aa, synthetic construct
  REGION 1..214: note = Synthetic polypeptide representing artificial human antibody VL chain
DIQLTQSPSFLSASVGDRVTITCRASQDISSFLAWYQQKPGKAPDLLIYAASTLQSGVPSRFSGSGSGTEFTLTISSLQPEDFAAYYCQHLTSFPYTFGQGTKLEIKRTVAAPSVFIFPPSDEQLKSGTASVVCLLNNFYPREAKVQWKVDNALQSGNSQESVTEQDSKDSTYSLSSTLTLSKADYEKHKVYACEVTHQGLSSPVTKSFNRGEL

SEQ ID NO: 394 - protein, 215 aa, synthetic construct
  REGION 1..215: note = Synthetic polypeptide representing artificial human antibody VL chain
VSSELTQDPAVSVALGQTVRITCQGDSLRDYSASWYQQKPGQAPILVIFFRNKRPSGIPDRFSGSASGNTASLTITGAQAEDEADYYCGSRDSSGNPSVFGAGTKVTVLGQPKANPTVTLFPPSSEELQANKATLVCLISDFYPGAVTVAWKADGSPVKAGVETTKPSKQSNNKYAASSYLSLTPEQWKSHRSYSCQVTHEGSTVEKTVAPTECS

SEQ ID NO: 395 - protein, 214 aa, synthetic construct
  REGION 1..214: note = Synthetic polypeptide representing artificial human antibody VL chain
EIVLTQSPATLSLSPGEGATLSCRASQSVSAYLGWYQQKPGQAPRLLIYDTSNRATGIPARFSGSGSGTDFTLTISSLEPEDFAVYYCQQRSNWLYTFGQGTKLEIKRTVAAPSVFIFPPSDEQLKSGTASVVCLLNNFYPREAKVQWKVDNALQSGNSQESVTEQDSKDSTYSLSSTLTLSKADYEKHKVYACEVTHQGLSSPVTKSFNRGEW

SEQ ID NO: 396 - protein, 215 aa, synthetic construct
  REGION 1..215: note = Synthetic polypeptide representing artificial human antibody VL chain
SYVLTQPPSVSVAPGKTARITCGGNNIGSKSVHWYQQKPGQAPVLVIYYDSDRPSGIPERFSGSNSGNTATLTISRVEAGDEADYYCQVWDSSSDHQEVFGGGTKLTVLGQPKAAPSVTLFPPSSEELQANKATLVCLISDFYPGAVTVAWKADGSPVKAGVETTTPSKQSNNKYAASSYLSLTPEQWKSHRSYSCQVTHEGSTVEKTVAPTECS

SEQ ID NO: 397 - protein, 216 aa, synthetic construct
  REGION 1..216: note = Synthetic polypeptide representing artificial human antibody VL chain
QSALTQPASVSGSPGQSITISCTGSSSDVGNYNLVSWYQLHPGKAPKLMIYEVIKRPSGVSSHFSGSKSGNTASLTISGLQAEDEADYYCCSYAPSNTYVFGTGTRVTVLGQPKANPTVTLFPPSSEELQANKATLVCLISDFYPGAVTVAWKADGSPVKAGVETTKPSKQSNNKYAASSYLSLTPEQWKSHRSYSCQVTHEGSTVEKTVAPTECS

SEQ ID NO: 398 - protein, 214 aa, synthetic construct
  REGION 1..214: note = Synthetic polypeptide representing artificial human antibody VL chain
QIVLTQSPATLSLSPGERVTLSCRASQSVRSHLAWYQQKPGQAPRLLMYDAFNRATGTPARFSGSGSGTDFTLTISSLEPEDFAIYYCQQRSNWPLTFGGGTKVEIKRTVAAPSVFIFPPSDEQLKSGTASVVCLLNNFYPREAKVQWKVDNALQSGNSQESVTEQDSKDSTYSLSSTLTLSKADYEKHKVYACEVTHQGLSSPVTKSFNRGEL

SEQ ID NO: 399 - protein, 216 aa, synthetic construct
  REGION 1..216: note = Synthetic polypeptide representing artificial human antibody VL chain
VSSELTQDPAVSVALGQTVRITCQGDSLRSYYATWYQQKPGQAPLLVIFDKDKRPSGIPDRFSGSSSGNTASLTITGAQPEDEAVYYCNSRDSSAHDHLLFGGGTTLTVLGQPKAAPSVTLFPPSSEELQANKATLVCLISDFYPGAVTVAWKADSSPVKAGVETTTPSKQSNNKYAASSYLSLTPEQWKSHRSYSCQVTHEGSTVEKTVAPTECS

SEQ ID NO: 400 - protein, 216 aa, synthetic construct
  REGION 1..216: note = Synthetic polypeptide representing artificial human antibody VL chain
EVVLTQSPGTLSLSPGERATLFCKASQAIVSNYLVWYQQKPGLAPRLLIYSASTRATGIPDRFSGGGSGTDFSLTISGLEPEDFAVYYCQHFGDSPLYIFGQGTKVEIKRTVAAPSVFIFPPSDEQLKSGTASVVCLLNNFYPREAKVQWKVDNALQSGNSQESVTEQDSKDSTYSLSSTLTLSKADYEKHKVYACEVTHQGLSSPVTKSFNRGEC

SEQ ID NO: 401 - protein, 212 aa, synthetic construct
  REGION 1..212: note = Synthetic polypeptide representing artificial human antibody VL chain
PYELTQPLSVSVALGQTARVTCGGTNIGKKDVHWYQQKPGQAPVLVIYRDDNRPSGIPERFSGLNSGHTATLTISRAQAGDEADYYCQVWDSSTAVFGGGTKLTVLGQPKAAPSVTLFPPSSEELQANKATLVCLISDFYPGAVTVAWKADSSPVKAGVETTTPSKQSNNKYAASSYLSLTPEQWKSHRSYSCQVTHEGSTVEKTVAPTECS

SEQ ID NO: 402 - protein, 108 aa, synthetic construct
  REGION 1..108: note = Synthetic polypeptide representing artificial human antibody VL chain
LYVLTQPPSVSVAPGKTARITCGGNNIGSKSVHWYQQKPGQAPVLVIYDDSDRPSGIPERFSGSNSGNTATLTISRVEAGDEADYYCQVWDSSSDHVVFGGGTKLTVQ

SEQ ID NO: 403 - protein, 214 aa, synthetic construct
  REGION 1..214: note = Synthetic polypeptide representing artificial human antibody VL chain
SYELTQTPSVSVSPGQTARITCSGDALPKQSVNWYQQRPGQAPVVVICKDTERPSGIPERFSGSTSGTTVTLTIGGVQAEDEADYYCQSADSSGFYVVFGGGTKLTVLGQPKAAPSVTLFPPSSEELQANKATLVCLISDFYPGAVTVAWKADSSPVKAGVETTTPSKQSNNKYAASSYLSLTPEQWKSHKSYSCQVTHEGSTVEKTVAPTECS

SEQ ID NO: 404 - protein, 212 aa, synthetic construct
  REGION 1..212: note = Synthetic polypeptide representing artificial human antibody VL chain
SYELTQPPSVSVSPGQTARITCSGDALPKQYAYWYQQKPGQAPVLVIYKDSERPSGIPERFSGSSSGTTVTLTISGVQAEDEADYYCQSADSSSPVFGGGTKLTVLGQPKAAPSVTLFPPSSEELQANKATLVCLISDFYPGAVTVAWKADSSPVKAGVETTTPSKQSNNKYAASSYLSLTPEQWKSHRSYSCQVTHEGSTVEKTVAPTECS

SEQ ID NO: 405 - protein, 213 aa, synthetic construct
  REGION 1..213: note = Synthetic polypeptide representing artificial human antibody VL chain
SYELTQPPSVSVPPGQTARITCSGDALPKKYAYWYQQKSGQAPVLVIYEDTKRPSGIPDRFSGSSSGTMATLTISGAQVEDDADYYCYSTDSRATGVFGGGTKLTVLGQPKAAPSVTLFPPSSEELQANKATLVCLISDFYPGAVTVAWKADSSPVKAGVETTTPSKQSNNKYAASSYLSLTPEQWKSHRSYSCQVTHEGSTVEKTVAPTECS

SEQ ID NO: 406 - protein, 214 aa, synthetic construct
  REGION 1..214: note = Synthetic polypeptide representing artificial human antibody VL chain
AVQMTQSPSSLSASVGDRVTISCRASQTIDTYLNWYQQRPGKAPQLLIYAASSLQSGVPSRFSASGSGTHFTLIINSLQPEDFATYYCQQSYSTPQTFGQGTKVEIKRTVAAPSVFIFPPSDEQLKSGTASVVCLLNNFYPREAKVQWKVDNALQSGNSQESVTEQDSKDSTYSLSSTLTLSKADYEKHKVYACEVTHQGLSSPVTKSFNRGEC

SEQ ID NO: 407 - protein, 107 aa, synthetic construct
  REGION 1..107: note = Synthetic polypeptide representing artificial human antibody VL chain
DIQMTQSPSSLSASVGDRVTITCQATQGITNYLNWYQQKPGKAPKVLIYDASNLETGVPSRFSGNGSGTHFTFTISSLQPEDIATYYCQQYENLPLTFGGGTKVEIK

SEQ ID NO: 408 - protein, 214 aa, synthetic construct
  REGION 1..214: note = Synthetic polypeptide representing artificial human antibody VL chain
DIQMTQSPSSLSASVGDRVTITCQASQDISTFLNWYQQKPGKAPKLLIYDESNLETGVPSRFSGSGSGTDFTFTISSLQPEDIATYYCQQFDNLPLTFGGGTRLEIKRTVAAPSVFIFPPSDEQLKSGTASVVCLLNNFYPREAKVQWKVDNALQSGNSQESVTEQDSKDSTYSLSSTLTLSKADYEKHKVYACEVTHQGLSSPVTKSFNRGEC

SEQ ID NO: 409 - protein, 110 aa, synthetic construct
  REGION 1..110: note = Synthetic polypeptide representing artificial human antibody VL chain
QSALTQPRSVSGSPGQSVTISCTGTSSDIGGYNYVSWYQQHPGKAPKFVIYDVSQRPSGVPDRFSGSKSGNTASLTISGLQADDEADYYCSSYAGSYTWVFGGGTKVIVL

SEQ ID NO: 410 - protein, 105 aa, synthetic construct
  REGION 1..105: note = Synthetic polypeptide representing artificial human antibody VL chain
SYELTQPPSVSVSPGQTASITCSGDKLGDKYACWYQQKPGQSPVVVIYQDTKRPSGIPERFSGSNSGNTATLTISGTQAMDEADYYCQAWDSSTVVFGGGTKLTV

SEQ ID NO: 411 - protein, 110 aa, synthetic construct
  REGION 1..110: note = Synthetic polypeptide representing artificial human antibody VL chain
PSVLTQPPSLSAAPGQRVTISCSGSTSNIGNNFVSWYQQLPGAAPKLLIYDNDKRPSEIPDRFSGSKSGTSATLAITGLQTGDEADYYCGTWDSSLGAYVFGTGTKVTVL

SEQ ID NO: 412 - protein, 214 aa, synthetic construct
  REGION 1..214: note = Synthetic polypeptide representing artificial human antibody VL chain
EIVLTQSPGTLSLSPGERATLSCRASQSISSTYLVWYQQKPGQAPRLLIYAASYRATGIPDRFSGSGSGTDFILTISRLEPEDFAVYYCQQYGSSLTFGGGTKVEIKRTVAAPSVFIFPPSDEQLKSGTASVVCLLNNFYPREAKVQWKVDNALQSGNSQESVTEQDSKDSTYSLSSTLTLSKADYEKHKVYACEVTHQGLSSPVTKSFNRGEC

SEQ ID NO: 413 - protein, 215 aa, synthetic construct
  REGION 1..215: note = Synthetic polypeptide representing artificial human antibody VL chain
EIELTQSPGTLSLSPGERATLSCRASQSVSSSYLAWYQQKPGQAPRLLIYGASSRATGIPDRFSGSGSGTDFTLTISRLEPEDFAVYYCQQYGSSPLTFGGGTKVEIKRTVAAPSVFIFPPSDEQLKSGTASVVCLLNNFYPREAKVQWKVDNALQSGNSQESVTEQDSKDSTYSLSSTLTLSKADYEKHKLYACEVTHQGLSSPVTKSFNRGEC

SEQ ID NO: 414 - protein, 216 aa, synthetic construct
  REGION 1..216: note = Synthetic polypeptide representing artificial human antibody VL chain
ASALTQPASVSGSPGQSITISCNGSSSDVGDYNYVSWYQQHPGKAPKLMIYDVSNRPSGVSNRFSGSKSGNTASLTISGLQAEDEADYYCSSYTSSRSLVFGGGTKLTVLGQPKAAPSVTLFPPSSEELQANKATLVCLISDFYPGAVTVAWKADSSPVKAGVETTTPSKQSNNKYAASSYLSLTPEQWKSHRSYSCQVTHEGSTVEKTVAPTECS

SEQ ID NO: 415 - protein, 214 aa, synthetic construct
  REGION 1..214: note = Synthetic polypeptide representing artificial human antibody VL chain
DIQMTQSPSSLSASVGDKVTMTCRASQFISVYVNWYQQKPGKAPKLLIYTASSLESGVSSRFSGGGSGTDFTLTIRSLQPEDFAIYYCQQTYSTPWTFGPGTRVEIKRTVAAPSVFIFPPSDEQLKSGTASVVCLLNNFYPREAKVQWKVDNALQSGNSQESVTEQDSKDSTYSLSSTLTLSKADYEKHKVYACEVTHQGLSSPVTKSFNRGEC

SEQ ID NO: 416 - protein, 214 aa, synthetic construct
  REGION 1..214: note = Synthetic polypeptide representing artificial human antibody VL chain
GEVVMTQSPATLSVSPGERATLSCRASQSVSSKVAWYQQRPGRAPRLLIYGASTRATDIPARFSGSGSGTEFTLTISSLQSEDFAVYYCQQYNNWLTFGGGTKVEIKRTVAAPSVFIFPPSDEQLKSGTASVVCLLNNFYPREAKVQWKVDNALQSGNSQESVTEQDSKDSTYSLSSTLTLSKADYEKHKVYACEVTHQGLSSPVTKSFNRGEW

SEQ ID NO: 417 - protein, 106 aa, synthetic construct
  REGION 1..106: note = Synthetic polypeptide representing artificial human antibody VL chain
SYELTQPSSVSVSPGQTARITCSGDVLAKNYARWFQQKPGQAPLLVIYKDNIRPSGIPERFSGSSSGTTVTLTISGAHVDDEADYYCYSTPDNNGVFGGGTKLIVL

SEQ ID NO: 418 - protein, 216 aa, synthetic construct
  REGION 1..216: note = Synthetic polypeptide representing artificial human antibody VL chain
QSALTQPASVSGSPGQSITISCTGTSSDVGAYPYVSWYQHHPGRAPKLTIFDVINRPSGVSNRFSGSKSGNTASLTISGLQAEDEAFYYCSSYTTSNSVVFGGGTKLTVLSQPKAAPSVTLFPPSSEELQANKATLVCLISDFYPGAVTVAWKADSSPVKAGVETTTPSKQSNNKYAASSYLSLTPEQWKSHRSYSCQVTHEGSTVEKTVAPTECS

SEQ ID NO: 419 - protein, 215 aa, synthetic construct
  REGION 1..215: note = Synthetic polypeptide representing artificial human antibody VL chain
EIVLTQSPGTLSLSPGERATLSCRASQSLSSGYLAWYQQKPGQAPRLLIYGASYRATDIPDRFSGSGSGTDFTLTISRLEPEDFAVYYCQQYDNSPLTFGGGTKVEIKRTVAAPSVFIFPPSDEQLKSGTASVVCLLNNFYPREAKVQWKVDNALQSGNSQESVTEQDSKDSTYSLSSTLTLSKADYEKHKVYACEVTHQGLSSPVTKSFNRGEC

SEQ ID NO: 420 - protein, 113 aa, synthetic construct
  REGION 1..113: note = Synthetic polypeptide representing artificial human antibody VL chain
GIVMTQSPDSLAVSLGERATINCKSSQSLLYRSNDKNYFAWYQQKPGQPPKLLIYWASTRESGVPDRFSGSGSGTDFTLTISSLQAEDVAVYYCQQYWGTPYTFGQGTKLEIK

SEQ ID NO: 421 - protein, 216 aa, synthetic construct
  REGION 1..216: note = Synthetic polypeptide representing artificial human antibody VL chain
PAVLTQAPSVSGAPGQRVTISCTGSGSNIGAGYDAHWYQQLPGTAPKLLIYRNTNRPSGVPDRFSGSKSGSSASLAITGLQPEDEAEYYCQSYDSGLGVVFGGGTKLTVLGQPKAAPSVTLFPPSSEELQANKATLVCLISDFYPGAVTVAWKADSSPVKAGVETTTPSKQSNNKYAASSYLSLTPEQWKSHRSYSCQVTHEGSTVEKTVAPTECS

SEQ ID NO: 422 - protein, 216 aa, synthetic construct
  REGION 1..216: note = Synthetic polypeptide representing artificial human antibody VL chain
QSALTQPPSASGSPGQSVTISCTGTSSDVGGYDHVSWYQQHPGKAPKVMIYEVTKRPSGVPDRFSGSKSGNTASLTVSGLQAEDEAEYYCSSYAGINNLVFGGGTKLTVLGQPKAAPSVTLFPPSSEELQANKATLVCLISDFYPGAVTVAWKADSSPVKAGVETTTPSKQSNNKYAASSYLSLTPEQWKSHRSYSCQVTHEGSTVEKTVAPTECS

SEQ ID NO: 423 - protein, 214 aa, synthetic construct
  REGION 1..214: note = Synthetic polypeptide representing artificial human antibody VL chain
DIQMTQSPSTLSASVGDRVTITCRASQSISSWLAWYQQKPGKAPKLLIYKASSLESGVPSRFSGSGSGTEFTLTISSLQPDDFATYYCQQYNSYSQTFGQGTKVEIKRTVAAPSVFIFPPSDEQLKSGTASVVCLLNNFYPREAKVQWKVDNALQSGNSQESVTEQDSKDSTYSLSSTLTLSKADYEKHKVYACEVTHQGLSSPVTKSFNRGEC

SEQ ID NO: 424 - protein, 214 aa, synthetic construct
  REGION 1..214: note = Synthetic polypeptide representing artificial human antibody VL chain
EIVMTQSPATLSVSPGERATLSCRASQSIVTNLAWFQQKPAQAPRLLIYGASTRATDVPARFSGSGSGTEFTLTVSSLQSEDFAIYFCQQYTDWPYTFGQGTKLEIKRTVAAPSVFIFPPSDEQLKSGTASVVCLLNNFYPREAKVQWKVDNALQSGNSQESVTEQDSKDSTYSLSSTLTLSKADYEKHKVYACEVTHQGLSSPVTKSFNRGEC

SEQ ID NO: 425 - protein, 216 aa, synthetic construct
  REGION 1..216: note = Synthetic polypeptide representing artificial human antibody VL chain
PLVLTQSPSASASLGASVKLTCTLSSGHSTYAIAWHQQRPEKGPRYLMKLNSDGSHIKGDGIPARFSGASSGVDRYLIISSSQSEDEADYYCQTWGTVGVFGGGTKLTVLGQPKAAPSVTLFPPSSEELQANKATLVCLISDFYPGAVTVAWKADSSPVKAGVETTTPSKQSNNKYAASSYLSLTPEQWKSHKSYSCQVTHEGSTVEKTVAPTECS

SEQ ID NO: 426 - protein, 215 aa, synthetic construct
  REGION 1..215: note = Synthetic polypeptide representing artificial human antibody VL chain
EIVLTQSPGTLSLSPGERATLSCRAGQSVSSSYLAWYQQKPGQAPRLLIYGASSRATGIPDRFSGSGSGTDFTLTISRLEPEDFAVYYCQQYGSSPWTFGQGTKVEIKRTVAAPSVFIFPPSDEQLKSGTASVVCLLNNFYPREAKVQWKVDNALQSGNSQESVTEQDSKDSTYSLSSTLTLSKADYEKHKVYACEVTHQGLSSPVTKSFNRGEC

SEQ ID NO: 427 - protein, 217 aa, synthetic construct
  REGION 1..217: note = Synthetic polypeptide representing artificial human antibody VL chain
QSVLTQPPSVSGAPGQRVTIPCTGSSSNLGAGYAVHWYQQLPATTPKLLIYANSSRPSGVPDRFSGSRSDTSASLAITGLQAEDEADYYCQSYDSSLSGYVFGTGTWVTVLSQPKANPTVTLFPPSSEELQANKATLVCLISDFYPGAVTVAWKADGSPVKAGVETTKPSKQSNNKYAASSYLSLTPEQWKSHRSYSCQVTHEGSTVEKTVAPTECS

SEQ ID NO: 428 - protein, 217 aa, synthetic construct
  REGION 1..217: note = Synthetic polypeptide representing artificial human antibody VL chain
QSVLTQPPSVSGAPGQRITISCTGGSTNIGTIYDVHWYQQLPGAAPKLLIYGNSRRPSGVPDRFSASKSGTSASLAISGLRPEDEADYYCQCFDTSLTAKVFGGGTKLTVLGQPKAAPSVTLFPPSSEELQANKATLVCLISDFYPGAVTVAWKADSSPVKAGVETTTPSKQSNNKYAASSYLSLTPEQWKSHRSYSCQVTHEGSTVEKTVAPTECS

SEQ ID NO: 429 - protein, 112 aa, synthetic construct
  REGION 1..112: note = Synthetic polypeptide representing artificial human antibody VL chain
DILLTQSPLFLSVTPGEPASISCRSNQSLLSSNGHHLLDWYFQKPGQSPQLLMFLGSTRASGVPDRFSGSASGTEFTLKISTVEAEDFGVYYCMQALQVPRTFGRGTKVEIK

SEQ ID NO: 430 - protein, 214 aa, synthetic construct
  REGION 1..214: note = Synthetic polypeptide representing artificial human antibody VL chain
DIQLTQSPSFLSASVGDRVTITCRASQGISSYLAWYQQKPGKAPKLLIYAASTLQSGVPSRFSGSGSGTEFTLTISSLQPEDFATYYCQQLNSYPLTFGGGTKVEIKRTVAAPSVFIFPPSDEQLKSGTASVVCLLNNFYPREAKVQWKVDNALQSGNSQESVTEQDSKDSTYSLSSTLTLSKADYEKHKLYACEVTHQGLSSPVTKSFNRGEL

SEQ ID NO: 431 - protein, 216 aa, synthetic construct
  REGION 1..216: note = Synthetic polypeptide representing artificial human antibody VL chain
PAVLTQPPSASGTPGQRVTISCSGSNSNIGSTFVYWYQQLPGTAPKLLIHSNNQRPSGVPDRVSGSKSGTSASLAISGLRSEDEADYYCAAWDDSLSGPVFGGGTKLTVLGQPKAAPSVTLFPPSSEELQANKATLVCLISDFYPGAVTVAWKADSSPVKAGVETTTPSKQSNNKYAASSYLSLTPEQWKSHKSYSCQVTHEGSTVEKTVAPTECS

SEQ ID NO: 432 - protein, 219 aa, synthetic construct
  REGION 1..219: note = Synthetic polypeptide representing artificial human antibody VL chain
DIVLTQSPLSLPVTPGEPASISCRSSQSLLHSNGVYYLDWYLLKPGQSPQLVIYMGSSRASGVPDRFSGSGSGTDFRLKISRVEAEDVGIYYCMQALQTPWTFGQGTKVEIKRTVAAPSVFIFPPSDEQLKSGTASVVCLLNNFYPREAKVQWKVDNALQSGNSQESVTEQDSKDSTYSLSSTLTLSKADYEKHKVYACEVTHQGLSSPVTKSFNRGEW

SEQ ID NO: 433 - protein, 216 aa, synthetic construct
  REGION 1..216: note = Synthetic polypeptide representing artificial human antibody VL chain
VSSELTQDPAVSVALGQTVRITCQGDSLRSYFATWYQQKPGQAPVLVIYGKNSRPSGIPDRFSGSTSGNTASLTISGAQAEDEADYYCNSRDSSDDHLEVFGGGTKLTVLGQPKAAPSVTLFPPSSEELQANKATLVCLISDFYPGAVTVAWKADSSPVKAGVETTTPSKQSNNKYAASSYLSLTPEQWKSHRSYSCQVTHEGSTVEKTVAPTECS

SEQ ID NO: 434 - protein, 214 aa, synthetic construct
  REGION 1..214: note = Synthetic polypeptide representing artificial human antibody VL chain
YIQMTQSPSTLSASVGDRVTITCRASQSISSWLAWFQQKPGKAPKLLIYKASTLESGVPSRFSGSESGTEFTLTIGSLQPDDFATYYCQQYNSYPRTFGQGTKVDIKRTVAAPSVFIFPPSDEQLKSGTASVVCLLNNFYPREAKVQWKVDNALQSGNSQESVTEQDSKDSTYSLSSTLTLSKADYEKHKVYACEVTHQGLSSPVTKSFNRGEC

SEQ ID NO: 435 - protein, 220 aa, synthetic construct
  REGION 1..220: note = Synthetic polypeptide representing artificial human antibody VL chain
DIVMTQSPDSLAVTLGERATINCRSSQTVLYDSNNKNYLAWYQQKPGQPPKLLIYWASIRESGVPDRFSGSGSGTDFTLTINTLQAEDVAIYFCQQYFTTPRTFGQGTKVEIKRTVAAPSVFIFPPSDEQLKSGTASVVCLLNNFYPREAKVQWKVDNALQSGNSQESVTEQDSKDSTYSLSSTLTLSKADYEKHKVYACEVTHQGLSSPVTKSFNRGEL

SEQ ID NO: 436 - protein, 217 aa, synthetic construct
  REGION 1..217: note = Synthetic polypeptide representing artificial human antibody VL chain
PAVLTQPPSVSGTPGQRVTISCSGGSSNIGGKYVYWYQQLPGTAPKVVIYRNNQRPSGVSDRFSGSKSGISASLTISGLRSEDEAVYYCAAWDDGLGGLYVFGTGTKVTALGQPKANPTVTLFPPSSEELQANKATLVCLISDFYPGAVTVAWKADGSPVKAGVETTKPSKQSNNKYAASSYLSLTPEQWKSHRSYSCQVTHEGSTVEKTVAPTECS

SEQ ID NO: 437 - protein, 213 aa, synthetic construct
  REGION 1..213: note = Synthetic polypeptide representing artificial human antibody VL chain
DIQMTQSPSTLSASVGDRVTISCRASQSISDWLAWYQQKPGKAPKLLIYAASILQSGVPSRFSGSGSGTEFTLTISSLQTDDFATYYCQQYNRGSTFGPGTKVDIKRTVAAPSVFIFPPSDEQLKSGTASVVCLLNNFYPREAKVQWKVDNALQSGNSQESVTEQDSKDSTYSLSSTLTLSKADYEKHKVYACEVTHQGLSSPVTKSFNRGEW

SEQ ID NO: 438 - protein, 214 aa, synthetic construct
  REGION 1..214: note = Synthetic polypeptide representing artificial human antibody VL chain
SYVLPQPPSVSVAPGQTAKITCGGNNPGIKSVHWYQQRPGQAPVLVIYDDSDRPSGIPERFSGSNSGNTVTLTISWVEAGDEADYYCQVWDRNSHRVIFGGGTKLTVLGQPKAAPSVTLFPPSSEELQANKATLVCLISDFYPGAVTVAWKADSSPVKAGVETTTPSKQSNNKYAASSYLSLTPEQWKSHRSYSCQVTHEGSTVEKTVAPTECS

SEQ ID NO: 439 - protein, 217 aa, synthetic construct
  REGION 1..217: note = Synthetic polypeptide representing artificial human antibody VL chain
PSVLTQPPSVSGAPGQRVTISCTGSTSNIGADYDVHWYQQLPRTAPKLLIYANNNRPSGVPDRFSGSKSGTSASLAITGLQAEDEADYYCQSYDNSLSAWVFGGGTKLTVLGQPKAAPSVTLFPPSSEELQANKATLVCLISDFYPGAVTVAWKADSSPVKAGVETTTPSKQSNNKYAASSYLSLTPEQWKSHKSYSCQVTHEGSTVEKTVAPTECS

SEQ ID NO: 440 - protein, 214 aa, synthetic construct
  REGION 1..214: note = Synthetic polypeptide representing artificial human antibody VL chain
SSELTQDPAVSVALGQTVRITCQGDSLRSFYGSWYQQKPGQAPVLVIYGENNRPSGIPDRFSGSSSGNTASLTITGAQAEDEADYYCNSRDSSGNHWVFGGGTKLTVLGQPKAAPSVTLFPPSSEELQANKATLVCLISDFYPGAVTVAWKADSSPVKAGVETTTPSKQSNNKYAASSYLSLTPEQWKSHKSYSCQVTHEGSTVEKTVAPTECS

SEQ ID NO: 441 - protein, 217 aa, synthetic construct
  REGION 1..217: note = Synthetic polypeptide representing artificial human antibody VL chain
QSALTQPASVSGSPGQSITISCTGISSDVDGYNYVSWYQLYSGKAPKLIIYDVTNRPSGVSHRFSGSKSGNTASLTISGLQAEDEADYYCSSYIRSSTPVVFGGGTKLTVLGQPKAAPSVTLFPPSSEELQANKATLVCLISDFYPGAVTVAWKADSSPVKAGVETTTPSKQSNNKYAASSYLSLTPEQWKSHRSYSCQVTHEGSTVEKTVAPTECS

SEQ ID NO: 442 - protein, 220 aa, synthetic construct
  REGION 1..220: note = Synthetic polypeptide representing artificial human antibody VL chain
DIVMTQSPDSLAVSLGERATINCKSSQSVLYSSDNKNYLAWYQQKPGQPPKLLIYWASTRESGVPDRFSGSGSGTDFTLTISSLEAEDVAVYYCQQYYDTPYTFGQGTKLEIKRTVAAPSVFIFPPSDEQLKSGTASVVCLLNNFYPREAKVQWKVDNALQSGNSQESVTEQDSKDSTYSLSSTLTLSKADYEKHKVYACEVTHQGLSSPVTKSFNRGEC

SEQ ID NO: 443 - protein, 216 aa, synthetic construct
  REGION 1..216: note = Synthetic polypeptide representing artificial human antibody VL chain
ASALTQPASVSGSPGQSITISCTGTSSDVGGYNYVSWYQQHPGKAPKLMIYEVSNRPSGVSNRFSGSKSGNTASLTISGLQAEDEADYYCSSYTSSSTLVFGGGTKLTVLGQPKAAPSVTLFPPSSEELQANKATLVCLISDFYPGAVTVAWKADSSPVKAGVETTTPSKQSNNKYAASSYLSLTPEQWKSHKSYSCQVTHEGSTVEKTVAPTECS

SEQ ID NO: 444 - protein, 213 aa, synthetic construct
  REGION 1..213: note = Synthetic polypeptide representing artificial human antibody VL chain
DIQMTQSPSSLSASVGDRVTITCQASQDISNYLNWYQQKPGKAPKLLIYDASNLETGVPSRFSGSGSGTDFTFTISSLQPEDIATYYCQQYDNLWTFGQGTKVEIKRTVAAPSVFIFPPSDEQLKSGTASVVCLLNNFYPREAKVQWKVDNALQSGNSQESVTEQDSKDSTYSLSSTLTLSKADYEKHKVYACEVTHQGLSSPVTKSFNRGEC

SEQ ID NO: 445 - protein, 215 aa, synthetic construct
  REGION 1..215: note = Synthetic polypeptide representing artificial human antibody VL chain
PYVLTQPPSVSVAPGQTARITCGGNNIGSKSVHWYQQKPGQAPVLVVYDDSDRPSGIPERFSGSNSGNTATLTISRVEAGDEADYYCQVWDSSSDHLYVFGTGTKVTVLGQPKANPTVTLFPPSSEELQANKATLVCLISDFYPGAVTVAWKADGSPVKAGVETTKPSKQSNNKYAASSYLSLTPEQWKSHRSYSCQVTHEGSTVEKTVAPTECS

SEQ ID NO: 446 - protein, 215 aa, synthetic construct
  REGION 1..215: note = Synthetic polypeptide representing artificial human antibody VL chain
EIVLAQSPGTLYLSPGERATLSCRASQSVRGNYLAWYQQRPGQAPRLLIYGASSRATGIPDRFGGSGSGTDFTLTITRLLPEDFAVYYCHQYGSSPRTFGQGTKVEIKRTVAAPSVFIFPPSDEQLKSGTASVVCLLNNFYPREAKVQWKVDNALQSGNSQESVTEQDSKDSTYSLSSTLTLSKADYEKHKVYACEVTHQGLSSPVTKSFNRGEC

SEQ ID NO: 447 - protein, 217 aa, synthetic construct
  REGION 1..217: note = Synthetic polypeptide representing artificial human antibody VL chain
QSVLTQPPSVSAATGQKVTISCSGGSSNIGSNYVSWYQQLPGTAPKLLIFENNKRPSGIPDRFSGSKSGTSATLGITGLQTGDEADYYCGTWDSSLTGGFVFGTGTKVTVLGQPKANPTVTLFPPSSEELQANKATLVCLISDFYPGAVTVAWKADGSPVKAGVETTKPSKQSNNKYAASSYLSLTPEQWKSHRSYSCQVTHEGSTVEKTVAPTECS

SEQ ID NO: 448 - protein, 214 aa, synthetic construct
  REGION 1..214: note = Synthetic polypeptide representing artificial human antibody VL chain
SYVLTQPPSVSVAPGKTATIACGENNIGSYNVNWYQQRPGQAPVLVIHSDSDRPSGISERFSGSNSGNTATLTISRVEAGDEADYYCQVWDTSNDVGVFGGGTKLTVLGQPKAAPSVTLFPPSSEELQANKATLVCLISDFYPGAVTVAWKADSSPVKAGVETTTPSKQSNNKYAASSYLSLTPEQWKSHRSYSCQVTHEGSTVEKTVAPTECS

SEQ ID NO: 449 - protein, 215 aa, synthetic construct
  REGION 1..215: note = Synthetic polypeptide representing artificial human antibody VL chain
EIVLTQSPGTLSLSPGGRATLSCRASQRVSSNYLAWYQQKPGQAPRLLIYGPSSRATGVPDRFSSSGSGTDFTLSISRLEPEDFAVYFCQQYGSSPPTFGGGTKVEIKRTVAAPSVFIFPPSDEQLKSGTASVVCLLNNFYPREAKVQWKVDNALQSGNSQESVTEQDSKDSTYSLSSTLTLSKADYEKHKVYACEVTHQGLSSPVTKSFNRGEC

SEQ ID NO: 450 - protein, 216 aa, synthetic construct
  REGION 1..216: note = Synthetic polypeptide representing artificial human antibody VL chain
ASALTQPASVSGSPGQSITISCTGTSSDVGSYNLVSWYQQHPGKAPELMIYEGSKRPSGVSNRFSGSKSGNTASLTISGLQAEDEADYYCCSYAGSSNWVFGGGTKLTVLGQPKAAPSVTLFPPSSEELQANKATLVCLISDFYPGAVTVAWKADSSPVKAGVETTTPSKQSNNKYAASSYLSLTPEQWKSHKSYSCQVTHEGSTVEKTVAPTECS

SEQ ID NO: 451 - protein, 218 aa, synthetic construct
  REGION 1..218: note = Synthetic polypeptide representing artificial human antibody VL chain
DVVMTQSPLYLPVTLGQPASISCRASQSLVYSDGNTYLNWVHQRPGQSPRRLIYMVSQRGSGVPDRFSGSGSDTDFTLKISRVEAEDVGVYYCMQGTHWSAFGQGTKLEIKRTVAAPSVFIFPPSDEQLKSGTASVVCLLNNFYPREAKVQWKVDNALQSGNSQESVTEQDSKDSTYSLSSTLTLSKADYEKHKVYACEVTHQGLSSPVTKSFNRGEC

SEQ ID NO: 452 - protein, 216 aa, synthetic construct
  REGION 1..216: note = Synthetic polypeptide representing artificial human antibody VL chain
PSVLTQPPSASGTPGQRVTISCSGSSSNIGSNYVYWYQQLPGTAPKLLIYRNNQRPSGVPDRFSGSKSGTSASLAISGLRSEDEADYYCAAWDDSLSGQVFGGGTKLTVLGQPKAAPSVTLFPPSSEELQANKATLVCLISDFYPGAVTVAWKADSSPVKAGVETTTPSKQSNNKYAASSYLSLTPEQWKSHKSYSCQVTHEGSTVEKTVAPTECS

SEQ ID NO: 453 - protein, 214 aa, synthetic construct
  REGION 1..214: note = Synthetic polypeptide representing artificial human antibody VL chain
VSSELTQDPAVSVALGQTVRITCQGDSLRSYYASWYQQRPGQAPVLVIYGKNNRPSGIPDRFSGSSSGNTASLTITGAQAEDEADYYCNSRDSSGNHVFGTGTKVTVLGQPKANPTVTLFPPSSEELQANKATLVCLISDFYPGAVTVAWKADGSPVKAGVETTKPSKQSNNKYAASSYLSLTPEQWKSHRSYSCQVTHEGSTVEKTVAPTECS

SEQ ID NO: 454 - protein, 213 aa, synthetic construct
  REGION 1..213: note = Synthetic polypeptide representing artificial human antibody VL chain
DIQMTQSPSSLSASVGDRVTITCRASQSISSYLNWYQQKPGKAPKLLIYAASSLQSGVPSRFSGSGSGTDFTLTISSLQPEDFATYYCQQSYSTPTFGQGTRLEIKRTVAAPSVFIFPPSDEQLKSGTASVVCLLNNFYPREAKVQWKVDNALQSGNSQESVTEQDSKDSTYSLSSTLTLSKADYEKHKVYACEVTHQGLSSPVTKSFNRGEC

SEQ ID NO: 455 - protein, 213 aa, synthetic construct
  REGION 1..213: note = Synthetic polypeptide representing artificial human antibody VL chain
YVLTQPPSVSVAPGQTARITCGGNNIGYRNVYWYHQKPGQAPVLVVYDDSDRPSGIPERFSGSNSGNTATLTISRVEAGDEADYFCQVWESGGDHPVFGGGTKLTVLGQPKAAPSVTLFPPSSEELQANKATLVCLISDFYPGAVTVAWKADSSPVKAGVETTTPSKQSNNKYAASSYLSLTPEQWKSHRSYSCQVTHEGSTVEKTVAPTECS

SEQ ID NO: 456 - protein, 214 aa, synthetic construct
  REGION 1..214: note = Synthetic polypeptide representing artificial human antibody VL chain
DIQMTQSPSSLSASVGDRVTITCRASQGIRNDLGWFQQKPGKAPKRLIYAASNLPSGVSSRFSGSGSGTEFTLTISSLQPEDFATYYCLQHNNYPLTFGQGTKVEFKRTVAAPSVFIFPPSDEQLKSGTASVVCLLNNFYPREAKVQWKVDNALQSGNSQESVTEQDSKDSTYSLSSTLTLSKADYEKHKVYACEVTHQGLSSPVTKSFNRGEC

SEQ ID NO: 457 - protein, 214 aa, synthetic construct
  REGION 1..214: note = Synthetic polypeptide representing artificial human antibody VL chain
DIQMTQSPSTLSASVGDRVTITCRASQSISSWLAWYQQKPGKAPKLLIYDASSLESGVPSRFSGSGSGTEFTLTISSLQPDDFATFYCQQYNSYPYTFGQGTKLEIKRTVAAPSVFIFPPSDEQLKSGTASVVCLLNNFYPREAKVQWKVDNALQSGNSQESVTEQDSKDSTYSLSSTLTLSKADYEKHKVYACEVTHQGLSSPVTKSFNRGEC

SEQ ID NO: 458 - protein, 219 aa, synthetic construct
  REGION 1..219: note = Synthetic polypeptide representing artificial human antibody VL chain
DIVMTQSPLSLPVTPGEPASISCRSSQSLLHSNGFNYLDWYLQKPGQSPQLLIYLGSNRASGVPDRFSGSGSGTDFTLKISRVEAEDVGVYYCMQALQIPRTFGQGTKVEIKRTVAAPSVFIFPPSDEQLKSGTASVVCLLNNFYPREAKVQWKVDNALQSGNSQESVTEQDSKDSTYSLSSTLTLSKADYEKHKVYACEVTHQGLSSPVTKSFNRGEC

SEQ ID NO: 459 - protein, 212 aa, synthetic construct
  REGION 1..212: note = Synthetic polypeptide representing artificial human antibody VL chain
PYELTQPPSVSVSPGQTASITCSGDKLGDKYACWYQQKPGQSPVLVIYQDSKRPSGIPERFSGSNSGNTATLTISGTQAMDEADYYCQAWDSNVHVFGTGTKVTVLGQPKANPTVTLFPPSSEELQANKATLVCLISDFYPGAVTVAWKADGSPVKAGVETTKPSKQSNNKYAASSYLSLTPEQWKSHRSYSCQVTHEGSTVEKTVAPTECS

SEQ ID NO: 460 - protein, 214 aa, synthetic construct
  REGION 1..214: note = Synthetic polypeptide representing artificial human antibody VL chain
SYELTQPPSVSVSPGQTARITCSGDALPKKYAFWYQQKSGQAPVLVIYEDSKRPSGIPERFSGSSSGTMATLTISGAQVEDESDYYCYSTDSSGNVWVFGGGTKLTVLGQPKAAPSVTLFPPSSEELQANKATLVCLISDFYPGAVTVAWKADSSPVKAGVETTTPSKQSNNKYAASSYLSLTPEQWKSHRSYSCQVTHEGSTVEKTVAPTECS

SEQ ID NO: 461 - protein, 215 aa, synthetic construct
  REGION 1..215: note = Synthetic polypeptide representing artificial human antibody VL chain
VSSELTQDPAVSVALGQTVRITCQGDSLRSYYASWYQQKPGQAPVLVIYGKNNRPSGIPDRFSGSSSGNTASLTITGAQAEDEADYYCNSRDSSGNLYVFGTGTKVTVLGQPKANPTVTLFPPSSEELQANKATLVCLISDFYPGAVTVAWKADGSPVKAGVETTKPSKQSNNKYAASSYLSLTPEQWKSHRSYSCQVTHEGSTVEKTVAPTECS

SEQ ID NO: 462 - protein, 220 aa, synthetic construct
  REGION 1..220: note = Synthetic polypeptide representing artificial human antibody VL chain
DIAMTQSPDSLAVSLGERATINCKSSQSVLYSSSSKNYLAWYQQKPGQPPKLLIYWASTRESGVPDRFSGSGSGTDFTLTISSLQAEDVAVYYCQQYYSSPLTFGGGTKVEIKRTVAAPSVFIFPPSDEQLKSGTASVVCLLNNFYPREAKVQWKVDNALQSGNSQESVTEQDSKDSTYSLSSTLTLSKADYEKHKVYACEVTHQGLSSPVTKSFNRGEC

SEQ ID NO: 463 - protein, 220 aa, synthetic construct
  REGION 1..220: note = Synthetic polypeptide representing artificial human antibody VL chain
DIVMTQSPLSLPVTPGEPASISCRSSQSLLHSNGYNYLDWYLQKPGQSPQLLIYLGSNRASGVPDRFSGSGSGTDFTLKISRVEADDVGVYYCMQALQTPPYTFGQGTKLEIKRTVAAPSVFIFPPSDEQLKSGTASVVCLLNNFYPREAKVQWKVDNALQSGNSQESVTEQDSKDSTYSLSSTLTLSKADYEKHKVYACEVTHQGLSSPVTKSFNRGEC

SEQ ID NO: 464 - protein, 216 aa, synthetic construct
  REGION 1..216: note = Synthetic polypeptide representing artificial human antibody VL chain
ASALTQPASVSGSPGQSITISCTGTSSDVGGYNYVSWYQQHPGKAPQLMIFDVSNRPSGVSNRFSGSKSGDTASLTISGLQAEDEADYYCSSYTSSSTWVFGGGTKLTVLGQPKAAPSVTLFPPSSEELQANKATLVCLISDFYPGAVTVAWKADSSPVKAGVETTTPSKQSNNKYAASSYLSLTPEQWKSHKSYSCQVTHEGSTVEKTVAPTECS

SEQ ID NO: 465 - protein, 220 aa, synthetic construct
  REGION 1..220: note = Synthetic polypeptide representing artificial human antibody VL chain
DIVMTQSPDSLAVSLGERATINCKSSQSVLYSSNNKNYLGWYQQKPGEPPKLVIHWASTRESGVPDRFSGSGSGTDFTLTISSLQAEDVAVYYCQQSYSTPYTFGQGTKLEIKRTVAAPSVFIFPPSDEQLKSGTASVVCLLNNFYPREAKVQWKVDNALQSGNSQESVTEQDSKDSTYSLSSTLTLSKADYEKHKVYACEVTHQGLSSPVTKSFNRGEC

SEQ ID NO: 466 - protein, 111 aa, synthetic construct
  REGION 1..111: note = Synthetic polypeptide representing artificial human antibody VL chain
QSALTQPASVSGSPGQSITISCTGTSSDVGSYNLVSWYQQHPGKAPKLMIYEGSKRPSGVSNRFSGSKSGNTASLTISGLQAEDEADYYCCSYAGSSTPWVFGGGTKLTVL

SEQ ID NO: 467 - protein, 214 aa, synthetic construct
  REGION 1..214: note = Synthetic polypeptide representing artificial human antibody VL chain
PYELTQPPSVSLSPGQTARITCSGDALPKKYAYWYQQKSGQAPVLVIYEDSKRPSGIPERFSGSSSGTTATLTISGAQVDDEGDYYCYSPDSSGNVWVFGGGTKLTVLGQPKAAPSVTLFPPSSEELQANKATLVCLISDFYPGAVTVAWKADSSPVKAGVETTTPSKQSNNKYAASSYLSLTPEQWKSHKSYSCQVTHEGSTVEKTVAPTECS

SEQ ID NO: 468 - protein, 103 aa, synthetic construct
  REGION 1..103: note = Synthetic polypeptide representing artificial human antibody VL chain
EIVMTQSPATLSVSPGERATLSCRASQSVSSNLAWYQQKPGQAPRLLIYGASTRATGLPARFSGSGSGTEFTLTISSLQSEDFAVYYCQSRGTFGGGTKVEIK

SEQ ID NO: 469 - protein, 109 aa, synthetic construct
  REGION 1..109: note = Synthetic polypeptide representing artificial human antibody VL chain
EIVLTQSPVTLSLSPGERATLSCRASQSVSSSYIAWYQQKPGQAPRLLIYGASTRATGIPDRFSGSGSGTDFTLTISRLEPEDCAVFYCQQYGSSHYTFGQGTKLEIKR

SEQ ID NO: 470 - protein, 215 aa, synthetic construct
  REGION 1..215: note = Synthetic polypeptide representing artificial human antibody VL chain
SYVLTQPPSVSVAPGKTARITCGGDNIGSRSVHWYQQKPGQAPVLVIYYDSDRPSGIPERFSGSNSGNTATLTISRVEAGDEADYYCQVWDSSSDHPWVFGGGTKLTVLRQPKAAPSVTLFPPSSEELQANKATLVCLISDFYPGAVTVAWKADSSPVKAGVETTTPSKQSNNKYAASSYLSLTPEQWKSHKSYSCQVTHEGSTVEKTVAPTECS

SEQ ID NO: 471 - protein, 111 aa, synthetic construct
  REGION 1..111: note = Synthetic polypeptide representing artificial human antibody VL chain
QSALTQPASVSGSPGQSITISCTGTSSDIGTYNLVSWYQQRPGKAPKLIIYDVIKRPSGISDRFSGSKSDNMASLTISGLQAEDEAHYYCCSYRSSTAPVVFGGGTKVTVL

SEQ ID NO: 472 - protein, 113 aa, synthetic construct
  REGION 1..113: note = Synthetic polypeptide representing artificial human antibody VL chain
GIVMTQSPDSLAVSLGERATINCKSSQSVLSTSNNKNYLAWYQQKPGQPPKLLIYWASTRESGVPDRFSGSGSGTDFTLTISSLQAEDVAVYYCQQYFSTPWTFGQGTKVEIK

SEQ ID NO: 473 - protein, 214 aa, synthetic construct
  REGION 1..214: note = Synthetic polypeptide representing artificial human antibody VL chain
SYVLTQPPSVSVAPGQTARITCGGNNIGSKSVHWYQQKPGQAPVLVVYDDSDRPSGIPERFSGSNSGNTATLTISRVEAGDEADYYCQVWDGYSDPLVFGGGTKLTVLGQPKAAPSVTLFPPSSEELQANKATLVCLISDFYPGAVTVAWKADSSPVKAGVETTTPSKQSNNKYAASSYLSLTPEQWKSHKSYSCQVTHEGSTVEKTVAPTECS

SEQ ID NO: 474 - protein, 214 aa, synthetic construct
  REGION 1..214: note = Synthetic polypeptide representing artificial human antibody VL chain
EVQMTQSPSSLSASVGDRVTITCRASQHIAGRLNWYQQKPGKAPKLLIHSASSVQREVPSRFGGSGFGTDFTLTIYSLQAEDFATYFCQQSYYTPPTFAGGTRVDLKRTVAAPSVFIFPPSDEQLKSGTASVVCLLNNFYPREAKVQWKVDNALQSGNSQESVTEQDSKDSTYSLSSTLTLSKADYEKHKVYACEVTHQGLSSPVTKSFNRGEC

SEQ ID NO: 475 - protein, 217 aa, synthetic construct
  REGION 1..217: note = Synthetic polypeptide representing artificial human antibody VL chain
RSVLTQPPSASGTPGQRVTISCSGSSSNIGSNTVNWYQQLPGTAPKLLIYSNNQRPSGVPDRFSGSKSGTSASLAISGLQSEDEADYYCAAWDDSLNGLWVFGGGTKLTVLGQPKAAPSVTLFPPSSEELQANKATLVCLISDFYPGAVTVAWKADSSPVKAGVETTTPSKQSNNKYAASSYLSLTPEQWKSHKSYSCQVTHEGSTVEKTVAPTECS

SEQ ID NO: 476 - protein, 217 aa, synthetic construct
  REGION 1..217: note = Synthetic polypeptide representing artificial human antibody VL chain
DFLLTQPHSVSESPGKTVTISCTRSSGSIASNYVQWYQQRPGSSPSTVIYEDHQRPSGVPGRFSGSIDSSSNSASLTISGLKTEDEADYFCQSSDSNNHVVFGGGTKLTVLGQPKAAPSVTLFPPSSEELQANKATLVCLISDFYPGAVTVAWKADSSPVKAGVETTTPSKQSNNKYAASSYLSLTPEQWKSHRSYSCQVTHEGSTVEKTVAPTECS

SEQ ID NO: 477 - protein, 217 aa, synthetic construct
  REGION 1..217: note = Synthetic polypeptide representing artificial human antibody VL chain
RSVLTQPPSVSGAPGQRVTISCTGSSSNIGAHYDVHWYQQLPGTAPKLLIYGNSNRPSGVPDRFSGSKSGTSASLAITGLQAEDEADYYCQSYDSSLSGVLFGGGTKLTVLGQPKAAPSVTLFPPSSEELQANKATLVCLISDFYPGAVTVAWKADSSPVKAGVETTTPSKQSNNKYAASSYLSLTPEQWKSHRSYSCQVTHEGSTVEKTVAPTECS

SEQ ID NO: 478 - protein, 214 aa, synthetic construct
  REGION 1..214: note = Synthetic polypeptide representing artificial human antibody VL chain
DIQMTQSPSSLSASVGDRVTITCRASQSISSYLNWYQQKPGKAPKFLIYAASSLQSGVPSRFSGSGSGTDFTLTISSLQPEDFATYYCQQSYSTPFTFGPGTKVDLKRTVAAPSVFIFPPSDEQLKSGTASVVCLLNNFYPREAKVQWKVDNALQSGNSQESVTEQDSKDSTYSLSSTLTLSKADYEKHKVYACEVTHQGLSSPVTKSFNRGEC

SEQ ID NO: 479 - protein, 214 aa, synthetic construct
  REGION 1..214: note = Synthetic polypeptide representing artificial human antibody VL chain
DIQMTQSPPSLSASVGDRVTITCQASQDISNYLNWYQQKPGKTPKLLIYAASTLETGVPSRFSGSGSGTDFTFTINSLQPEDIATYYCQQYDSLPLTFGGGTKVEIKRTVAAPSVFIFPPSDEQLKSGTASVVCLLNNFYPREAKVQWKVDNALQSGNSQESVTEQDSKDSTYSLSSTLTLSKADYEKHKVYACEVTHQGLSSPVTKSFNRGEC

SEQ ID NO: 480 - protein, 216 aa, synthetic construct
  REGION 1..216: note = Synthetic polypeptide representing artificial human antibody VL chain
EIVLTQSPGTLSLSPGHRATLSCRASQDVASTYLAWYQQKPGQAPRLLIYGASSRATGIPDRFSGSGSGTDFTLTISRLEPEDFAVFYCQYYGGSPGFTFGPGTKVDFKRTVAAPSVFIFPPSDEQLKSGTASVVCLLNNFYPREAKVQWKVDNALQSGNSQESVTEQDSKDSTYSLSSTLTLSKADYEKHKVYACEVTHQGLSSPVTKSFNRGEC

SEQ ID NO: 481 - protein, 216 aa, synthetic construct
  REGION 1..216: note = Synthetic polypeptide representing artificial human antibody VL chain
QSALTQPASVSGSPGQSITISCTGTTSDVGTYNLVSWYQQLPGKAPKLIIYEVTKRPSGVSNRFSASKSGSTASLTISGLQAEDEADYYCCSYAGSSTYVFGSGARVTVLGQPKANPTVTLFPPSSEELQANKATLVCLISDFYPGAVTVAWKADGSPVKAGVETTKPSKQSNNKYAASSYLSLTPEQWKSHRSYSCQVTHEGSTVEKTVAPTECS

SEQ ID NO: 482 - protein, 216 aa, synthetic construct
  REGION 1..216: note = Synthetic polypeptide representing artificial human antibody VL chain
EIVLTQSPGTLSLSPGETATLSCRASQSVANNYLAWHQQKPGQAPRLLIYGASKRAAGIPDRFSGSGSGTEFTLTISRLEPEDCAVYYCQEYVKSPGFAFGPGTRVDIKRTVAAPSVFIFPPSDEQLKSGTASVVCLLNNFYPREAKVQWKVDNALQSGNSQESVTEQDSKDSTYSLSSTLTLSKADYEKHKVYACEVTHQGLSSPVTKSFNRGEC

SEQ ID NO: 483 - protein, 215 aa, synthetic construct
  REGION 1..215: note = Synthetic polypeptide representing artificial human antibody VL chain
EIVLTQSPATLSLSPGERATLSCRASQSVSSNYLAWYQQKPGQAPRLLIHGASSRATGFPDRFSGSGSGTDFTLTINRLEPEDFAVYYCQQYGTSPQTFGQGTKVEIKRTVAAPSVFIFPPSDEQLKSGTASVVCLLNNFYPREAKVQWKVDNALQSGNSQESVTEQDSKDSTYSLSSTLTLSKADYEKHKVYACEVTHQGLSSPVTKSFNRGEC

SEQ ID NO: 484 - protein, 216 aa, synthetic construct
  REGION 1..216: note = Synthetic polypeptide representing artificial human antibody VL chain
QTVVTQEPSFSVSPGGTVTFTCAWSSGSVSTSFYTSWYRQTPGQAPQTLIYNTNRRSSGVPDRFSGSILGNKAALTITGAQADDDSDYYCMLYMGSGISLFGGGTKLTVLGQPKAAPSVTLFPPSSEELQANKATLVCLISDFYPGAVTVAWKADSSPVKAGVETTTPSKQSNNKYAASSYLSLTPEQWKSHRSYSCQVTHEGSTVEKTVAPTECS

SEQ ID NO: 485 - protein, 218 aa, synthetic construct
  REGION 1..218: note = Synthetic polypeptide representing artificial human antibody VL chain
QSVLTQPPSVSGAPGQRVTISCTGSSSNIGAQYDVHWYKVIPGTAPKLLIYGNDNRPSGVPDRFSGSKSGTSASLAITGLQSEDEADYYCQSNDISLSGSVVFGGGTKLTVLGQPKAAPSVTLFPPSSEELQANKATLVCLISDFYPGAVTVAWKADSSPVKAGVETTTPSKQSNNKYAASSYLSLTPEQWKSHRSYSCQVTHEGSTVEKTVAPTECS

SEQ ID NO: 486 - protein, 217 aa, synthetic construct
  REGION 1..217: note = Synthetic polypeptide representing artificial human antibody VL chain
PSVLTQPPSVSGAPGQRVTISCTGSSSNIGAGYDVHWYQQLPGTAPKLLIYANTNRPSGVPDRFSGSKSGTSASLAITGLQAEDEADYYCQSYDNSLSGGVFGGGTKLTVLGQPKAAPSVTLFPPSSEELQANKATLVCLISDFYPGAVTVAWKADSSPVKAGVETTTPSKQSNNKYAASSYLSLTPEQWKSHRSYSCQVTHEGSTVEKTVAPTECS

SEQ ID NO: 487 - protein, 215 aa, synthetic construct
  REGION 1..215: note = Synthetic polypeptide representing artificial human antibody VL chain
KIVLTQSPGTLSLSPGERATLSCRASQSVSSSYLAWYQQRPGQSPRLLIYETSTRATGIPDRFSGSGSGTDFTLTISGLEPEDFAVYYCQQFDISPFTFGPGTKVDVKRTVAAPSVFIFPPSDEQLKSGTASVVCLLNNFYPREAKVQWKVDNALQSGNSQESVTEQDSKDSTYSLSSTLTLSKADYEKHKVYACEVTHQGLSSPVTKSFNRGEC

SEQ ID NO: 488 - protein, 216 aa, synthetic construct
  REGION 1..216: note = Synthetic polypeptide representing artificial human antibody VL chain
QSALTQPASVSGSPGQSITISCTGTSSDVGGYNYVSWYQQHPGKAPKLMIYDVSNRPSGVSNRFSGSKSGNTASLTISGLQAEDEADYYCSSYTSSSSLVFGGGTKVTVLGQPKAAPSVTLFPPSSEELQANKATLVCLISDFYPGAVTVAWKADSSPVKAGVETTTPSKQSNNKYAASSYLSLTPEQWKSHKSYSCQVTHEGSTVEKTVAPTECS

SEQ ID NO: 489 - protein, 110 aa, synthetic construct
  REGION 1..110: note = Synthetic polypeptide representing artificial human antibody VL chain
QSALTQPASVSGSPGQSITISCTGTSSDIGGYDLVSWYQHHPGKAPKLVISEGSKRPSGVSNRFFGSKSGNTASLTISGLQAEDEADYYCCSFTGTSTFVFGTGTKVTVL

SEQ ID NO: 490 - protein, 113 aa, synthetic construct
  REGION 1..113: note = Synthetic polypeptide representing artificial human antibody VL chain
DIVMTQSPDSLAVSLGERATINCKSSQSVLYSSNNKNYLAWYQQKPGQPPKLLIYWASTRESGVPDRFSGSGSGTDFTLTISSLEPEDFAVYYCQQYYSTPYTFGQGTKLEIK

SEQ ID NO: 491 - protein, 216 aa, synthetic construct
  REGION 1..216: note = Synthetic polypeptide representing artificial human antibody VL chain
QSVLTQPPSASGTPGQRVTISCSGSSSNIGSNTVNWYQQFPGTAPKLLIYSNNHRPLGVPDRFSGSKSGTSASLAISEVRSEDEADYYCATWDDSLNGGVFGAGTKLTVVGQPKAAPSVTLFPPSSEELQANKATLVCLISDFYPGAVTVAWKADSSPVKAGVETTTPSKQSNNKYAASSYLSLTPEQWKSHRSYSCQVTHEGSTVEKTVAPTECS

SEQ ID NO: 492 - protein, 215 aa, synthetic construct
  REGION 1..215: note = Synthetic polypeptide representing artificial human antibody VL chain
PAVVTQEPSLTVSPGGTVTLTCGSSTGVVTTGHYPYWFQQKPGQAPTTLIFDTSNKHSWTPARFSGSLLGGKAALTLSAAQPEDEADYYCWLISGGAPVFGGGTKLTVLGQPKAAPSVTLFPPSSEELQANKATLVCLISDFYPGAVTVAWKADSSPVKAGVETTTPSKQSNNKYAASSYLSLTPEQWKSHRSYSCQVTHEGSTVEKTVAPTECS

SEQ ID NO: 493 - protein, 111 aa, synthetic construct
  REGION 1..111: note = Synthetic polypeptide representing artificial human antibody VL chain
QSVLTQPPSVSGAPGQRVTISCAGSYSNIGAGYDVHWYRQLPGTAPTLLIYSNNNRPSGVSDRFSGSKSGTSASLAITGLQAEDEADYYCQSFDSSLSRSVFGTGTKVTVL

SEQ ID NO: 494 - protein, 107 aa, synthetic construct
  REGION 1..107: note = Synthetic polypeptide representing artificial human antibody VL chain
EIVLTQSPATLSFSPGDRATLSCRASQNINRFLAWYQQKPGQTPRLLIYDASTRATGIPARFSGSGSGTDFSLIISSLEPEDFAIYYCQQRNNWPITFGPGTKVDVK

SEQ ID NO: 495 - protein, 214 aa, synthetic construct
  REGION 1..214: note = Synthetic polypeptide representing artificial human antibody VL chain
AIQMTQSPSSLSASVGDRVTITCRASQGIRNDLGWYQQKPGKAPKLLIYAASSLQSGVPSRFSGSGSGTDFTLTISSLQPEDFATYYCLQDYNYPPTFGQGTKVEIKRTVAAPSVFIFPPSDEQLKSGTASVVCLLNNFYPREAKVQWKVDNALQSGNSQESVTEQDSKDSTYSLSSTLTLSKADYEKHKLYACEVTHQGLSSPVTKSFNRGEC

SEQ ID NO: 496 - protein, 108 aa, synthetic construct
  REGION 1..108: note = Synthetic polypeptide representing artificial human antibody VL chain
SSELTQDPAVSVALGQTVRITCQGDSLRTDYATWYQQKPGQAPILVFYGEDNRPSGIPDRFSGSSSGNTASLTITGAQAEDEADYYCNSRDSSGHHWVFGGGTKLTVL

SEQ ID NO: 497 - protein, 113 aa, synthetic construct
  REGION 1..113: note = Synthetic polypeptide representing artificial human antibody VL chain
DIVMTQSPDSLAVSLGERATLNCKSSQSVLSSYNNKDYLAWFQQKPGQPPQLLFYWASTRKTGVPDRFSGSGSGTDFTLTISSLQTEDVAVYYCQQYYSTPYTFGQGTKLEIK

SEQ ID NO: 498 - protein, 220 aa, synthetic construct
  REGION 1..220: note = Synthetic polypeptide representing artificial human antibody VL chain
DVVMTQSPLSLPVTLGQAASISCRSSQSLVYSDGNTYLNWFQQRPGQSPRRLIYKVSNRESGVPDRFSGSGSGTDFTLQISRVEAEDVGIYYCMQGAHWPPITFGQGTRLEIKRTVAAPSVFIFPPSDEQLKSGTASVVCLLNNFYPREAKVQWKVDNALQSGNSQESVTEQDSKDSTYSLSSTLTLSKADYEKHKVYACEVTHQGLSSPVTKSFNRGEC

SEQ ID NO: 499 - protein, 107 aa, synthetic construct
  REGION 1..107: note = Synthetic polypeptide representing artificial human antibody VL chain
SYELTQPPSVSVSPGQTARITCSGDALPKKYVFWYQQRSGQAPVLVIYEDSKRPSGIPDRFSGSSSGTLATLTISGAQVEDEADYYCYSTDTIGNWVFGGGTRLTVL

SEQ ID NO: 500 - protein, 214 aa, synthetic construct
  REGION 1..214: note = Synthetic polypeptide representing artificial human antibody VL chain
LYVLTQPPSVSVAPGQTARITCGGNNIGSKSVHWYQQKPGQAPVLVVYDDSDRPSGIPERFSGSNSGNTATLTISRVEAGDEADYYCQVWDSSSDHWIFGGGTKLTVLGQPKAAPSVTLFPPSSEELQANKATLVCLISDFYPGAVTVAWKADSSPVKAGVETTTPSKQSNNKYAASSYLSLTPEQWKSHKSYSCQVTHEGSTVEKTVAPTECS

SEQ ID NO: 501 - protein, 214 aa, synthetic construct
  REGION 1..214: note = Synthetic polypeptide representing artificial human antibody VL chain
DIQMTQSPSSLSASVGDRVTITCRASQSISTYLNWYQQKPGKAPKLLIYAASNLQSGVPSTFSGSGSGTDFTLTISSLQPEDFATYYCQQSYSPPLTFGGGTTVEIKRTVAAPSVFIFPPSDEQLKSGTASVVCLLNNFYPREAKVQWKVDNALQSGNSQESVTEQDSKDSTYSLSSTLTLSKADYEKHKVYACEVTHQGLSSPVTKSFNRGEC

SEQ ID NO: 502 - protein, 215 aa, synthetic construct
  REGION 1..215: note = Synthetic polypeptide representing artificial human antibody VL chain
EIVMTQSPATLSVSQGERATLSCRASQSVGSDLAWYQQKPGQAPRLLIYDASARATDIPARFSGSGSETEFTLTISSLQSEDFAVYYCQHYSDWRALTFGGGTKVEIKRTVAAPSVFIFPPSDEQLKSGTASVVCLLNNFYPREAKVQWKVDNALQSGNSQESVTEQDSKDSTYSLSSTLTLSKADYEKHKVYACEVTHQGLSSPVTKSFNRGEC

SEQ ID NO: 503 - protein, 220 aa, synthetic construct
  REGION 1..220: note = Synthetic polypeptide representing artificial human antibody VL chain
GIVMTQSPDSLAVSLGERATINCRSSQSVLYSSNNKNYLAWYQQKPGQPPKLLIYWASTRESGVPDRFSGSGSGTDFTLTISSLQAEDVAVYYCQQYYGPLWTFGQGTRVEIRRTVAAPSVFIFPPSDEQLKSGTASVVCLLNNFYPREAKVQWKVDNALQSGNSQESVTEQDSKDSTYSLSSTLTLSKADYEKHKVYACEVTHQGLSSPVTKSFNRGEC

SEQ ID NO: 504 - protein, 214 aa, synthetic construct
  REGION 1..214: note = Synthetic polypeptide representing artificial human antibody VL chain
SDELTQPPSVSVSPGQTARITCSGDALAKEYAYWYQQKSGQAPVLVISKDTERPSGIPARFSGSSSGTTVTLTISGVQSDDEADYYCQSADSSLTYWLFGGGTKLTVLRQPKAAPSVTLFPPSSEELQANKATLVCLISDFYPGAVTVAWKADSSPVKAGVETTTPSKQSNNKYAASSYLSLTPEQWKSHKSYSCQVTHEGSTVEKTVAPTECS

SEQ ID NO: 505 - protein, 106 aa, synthetic construct
  REGION 1..106: note = Synthetic polypeptide representing artificial human antibody VL chain
DIQMTQAPSTLSASVGDRVSITCRASQNIRDFLAWYQQKPGRAPDLLIYRASTLEKGVSARFSGSGSGTEFTLTITGLQPDDFATYYCQQYSDYSTFGGGTRVEIK

SEQ ID NO: 506 - protein, 220 aa, synthetic construct
  REGION 1..220: note = Synthetic polypeptide representing artificial human antibody VL chain
DIVMTQSPDSLAVSLGERATITCKSSQTILYSSNNKNYLAWYQQKPGQPPKLLIYWASTRESGVPDRFSGSGSGTDFTLTISSLQAEDVAVYYCHQYYTTPFTFGPGTTVDIRRTVAAPSVFIFPPSDEQLKSGTASVVCLLNNFYPREAKVQWKVDNALQSGNSQESVTEQDSKDSTYSLSSTLTLSKADYEKHKVYACEVTHQGLSSPVTKSFNRGEC

SEQ ID NO: 507 - protein, 212 aa, synthetic construct
  REGION 1..212: note = Synthetic polypeptide representing artificial human antibody VL chain
SYELTQPPSVSVSPGQTASITCSGDKLGNKYVCWYQQKPGQSPVLVIYQDTKRPSGIPERFSGSKSGNTATLTISGTQALDEADYYCQAWDSSTAEFGGGTKLTVLGQPKAAPSVTLFPPSSEELQANKATLVCLISDFYPGAVTVAWKADSSPVKAGVETTTPSKQSNNKYAASSYLSLTPEQWKSHRSYSCQVTHEGSTVEKTVAPTECS

SEQ ID NO: 508 - protein, 216 aa, synthetic construct
  REGION 1..216: note = Synthetic polypeptide representing artificial human antibody VL chain
RSVLTQPPSASGTPGQTVTISCSGSRSNIGSNFVYWYQHLPGSAPKTTIHSNTQRPPGVPDRFSGSKSGTSASLAISGLRSEDEADYYCVTWDDDLHGWVFGGGTRLTVLGQPKAAPSVTLFPPSSEELQANKATLVCLISDFYPGAVTVAWKADSSPVKAGVETTTPSKQSNNKYAASSYLSLTPEQWKSHKSYSCQVTHEGSTVEKTVAPTECS

SEQ ID NO: 509 - protein, 218 aa, synthetic construct
  REGION 1..218: note = Synthetic polypeptide representing artificial human antibody VL chain
RSVLTQPPSVSAAPGQKVIISCSGSSSNIGNNYVSWYQQFLGTAPKLLIYDTDKRPSGIPDRFSGSKSGTSATLGITGLQTGDEAHYYCATWDSSLRAGPVVFGGGTKLTVLGQPKAAPSVTLFPPSSEELQANKATLVCLISDFYPGAVTVAWKADSSPVKAGVETTTPSKQSNNKYAASSYLSLTPEQWKSHRSYSCQVTHEGSTVEKTVAPTECS

SEQ ID NO: 510 - protein, 214 aa, synthetic construct
  REGION 1..214: note = Synthetic polypeptide representing artificial human antibody VL chain
DIQMTQSPSTLSASVGDRVTITCRASQSVSFWLAWYQQKPGKAPNLLISKASTLESGVPSRFSGSGSGTEFTLTISSLQPDDFATYYCQQYNAYPVTFGGGTKVEIRRTVAAPSVFIFPPSDEQLKSGTASVVCLLNNFYPREAKVQWKVDNALQSGNSQESVTEQDSKDSTYSLSSTLTLSKADYEKHKVYACEVTHQGLSSPVTKSFNRGEC

SEQ ID NO: 511 - protein, 220 aa, synthetic construct
  REGION 1..220: note = Synthetic polypeptide representing artificial human antibody VL chain
GIVMIQSPDSLAVSLGERATINCKSSQSVFYSSNNKNYLAWYQQKPGQPPKLLIYWASTRESGVPDRFSGSGSGTDFTLTLTSLQAEDVAVYYCQQYYSTPWTFGQGTKVEIKRTVAAPSVFIFPPSDEQLKSGTASVVCLLNNFYPREAKVQWKVDNALQSGNSQESVTEQDSKDSTYSLSSTLTLSKADYEKHKVYACEVTHQGLSSPVTKSFNRGEC

SEQ ID NO: 512 - protein, 220 aa, synthetic construct
  REGION 1..220: note = Synthetic polypeptide representing artificial human antibody VL chain
DIVMTQSPDSLAVSLGERAAINCKSSQSVLYSSNNKNYLAWYQQRPGQPPKLLIHWASMRESGVPDRFSGSGSGTDFTLTISSLQAEDVAIYYCQQYYSPPLTFGGGTKVEIKRTVAAPSVFIFPPSDEQLKSGTASVVCLLNNFYPREAKVQWKVDNALQSGNSQESVTEQDSKDSTYSLSSTLTLSKADYEKHKVYACEVTHQGLSSPVTKSFNRGEC

SEQ ID NO: 513 - protein, 110 aa, synthetic construct
  REGION 1..110: note = Synthetic polypeptide representing artificial human antibody VL chain
QSALTQPASVSGSPGQSITISCTGSSNDIGRYKYVSWFQHHPGRAPKLIIYEVNNRPSGLSHRFSGSKSGNTASLTISGLQAEDEADYYCCSYTSSLTYVFGTGTAVTVL

SEQ ID NO: 514 - protein, 219 aa, synthetic construct
  REGION 1..219: note = Synthetic polypeptide representing artificial human antibody VL chain
DVVMTQSPLSLPVTLGQPASISCRSSQSLVYSDGNTYLNWFQQRPGQSPRRLIYKVSNRDSGVPDRFSGSGSGTDFTLKISRVEAEDVGVYYCMQGTHWPYTFGQGTKLEIKRTVAAPSVFIFPPSDEQLKSGTASVVCLLNNFYPREAKVQWKVDNALQSGNSQESVTEQDSKDSTYSLSSTLTLSKADYEKHKVYACEVTHQGLSSPVTKSFNRGEC

SEQ ID NO: 515 - protein, 212 aa, synthetic construct
  REGION 1..212: note = Synthetic polypeptide representing artificial human antibody VL chain
PYELTQPPSVSVSPGQTASITCSGDKLGDKYACWYQQKPGQSPVLVIYQDSKRPSGIPERFSGSNSGNTATLTISGTQAMDEADYYCQAWDSSTYVFGTGTKVTVLGQPKANPTVTLFPPSSEELQANKATLVCLISDFYPGAVTVAWKADGSPVKAGVETTKPSKQSNNKYAASSYLSLTPEQWKSHRSYSCQVTHEGSTVEKTVAPTECS

SEQ ID NO: 516 - protein, 216 aa, synthetic construct
  REGION 1..216: note = Synthetic polypeptide representing artificial human antibody VL chain
ENVLTQSPGTLSLSPGERATLSCRASQRVNSNYLAWYQQKSGQAPRLLIYGASSRATGIPDRFSGSGSGTDFTLTISRLEPEDFAVYYCQQYGGSPLFTFGPGTKVDIKRTVAAPSVFIFPPSDEQLKSGTASVVCLLNNFYPREAKVQWKVDNALQSGNSQESVTEQDSKDSTYSLSSTLTLSKADYEKHKLYACEVTHQGLSSPVTKSFNRGEC

SEQ ID NO: 517 - protein, 106 aa, synthetic construct
  REGION 1..106: note = Synthetic polypeptide representing artificial human antibody VL chain
PYELTQPPSVSVSPGQTASIACSGDNLGNKYAWWYRQKPGQSPVLVMYKDNKRPSGIPERFSGSNSGNTATLTISGTQAMDEADYYCQTWDSSTVIFGGGTKLTVQ

SEQ ID NO: 518 - protein, 219 aa, synthetic construct
  REGION 1..219: note = Synthetic polypeptide representing artificial human antibody VL chain
DIVMTQSPLSLPVTPGEPASISCRSSQSLLHSNGYNYLDWYLQKPGQSPQLLIYLGSNRASGVPDRFSGSGSGTDFTLKISRVEAEDVGVYYCMQALQTPYTFGQGTKLEIKRTVAAPSVFIFPPSDEQLKSGTASVVCLLNNFYPREAKVQWKVDNALQSGNSQESVTEQDSKDSTYSLSSTLTLSKADYEKHKVYACEVTHQGLSSPVTKSFNRGEC

SEQ ID NO: 519 - protein, 216 aa, synthetic construct
  REGION 1..216: note = Synthetic polypeptide representing artificial human antibody VL chain
QSVLTQPPSVSAAPGQKVTISCSGSSSNIGNNYVSWYQQLPGTAPKLLIYDNNKRPSGIPDRFSGSKSGTSATLGITGLQTGDEADYYCGTWDSSLSAGVFGTGTKVTVLGQPKANPTVTLFPPSSEELQANKATLVCLISDFYPGAVTVAWKADSSPVKAGVETTTPSKQSNNKYAASSYLSLTPEQWKSHRSYSCQVTHEGSTVEKTVAPTECS

SEQ ID NO: 520 - protein, 213 aa, synthetic construct
  REGION 1..213: note = Synthetic polypeptide representing artificial human antibody VL chain
DIQMTQSPSTLSASVGDRVTITCRASQSISSWLAWYQQKPGKAPKLLIYKASSLESGVPSRFSGSGSGTEFTLTISSLQPDDFATYYCQQYNSYWTFGQGTKVEIKRTVAAPSVFIFPPSDEQLKSGTASVVCLLNNFYPREAKVQWKVDNALQSGNSQESVTEQDSKDSTYSLSSTLTLSKADYEKHKVYACEVTHQGLSSPVTKSFNRGEC

SEQ ID NO: 521 - protein, 214 aa, synthetic construct
  REGION 1..214: note = Synthetic polypeptide representing artificial human antibody VL chain
DIQMTQSPSTLSASVGDRVTITCRASQSISSWLAWYQQKPGKAPKLLIYKASSLESGVPSRFSGSGSGTEFTLTISSLQPDDFATYYCQQYNSYPWTFGQGTKVEIKRTVAAPSVFIFPPSDEQLKSGTASVVCLLNNFYPREAKVQWKVDNALQSGNSQESVTEQDSKDSTYSLSSTLTLSKADYEKHKVYACEVTHQGLSSPVTKSFNRGEC

SEQ ID NO: 522 - protein, 218 aa, synthetic construct
  REGION 1..218: note = Synthetic polypeptide representing artificial human antibody VL chain
PAVLTQPPSVSGAPGQRVTISCTGSSSNIGAGYDVHWYQQLPGTAPKLLIYGNSNRPSGVPDRFSGSKSGTSASLAITGLQAEDEADYYCQSYDSSLSGSGVFGGGTKLTVLGQPKAAPSVTLFPPSSEELQANKATLVCLISDFYPGAVTVAWKADSSPVKAGVETTTPSKQSNNKYAASSYLSLTPEQWKSHKSYSCQVTHEGSTVEKTVAPTECS

SEQ ID NO: 523 - protein, 213 aa, synthetic construct
  REGION 1..213: note = Synthetic polypeptide representing artificial human antibody VL chain
SYELTQPPSVSVSPGQTARITCSGDALPKQYAYWYQQKPGQAPVLVIYKDSERPSGIPERFSGSSSGTTVTLTISGVQAEDEADYYCQSADSSGTYVFGTGTKVTVLGQPKANPTVTLFPPSSEELQANKATLVCLISDFYPGAVTVAWKADGSPVKAGVETTKPSKQSNNKYAASSYLSLTPEQWKSHRSYSCQVTHEGSTVEKTVAPTECS

SEQ ID NO: 524 - protein, 102 aa, synthetic construct
  REGION 1..102: note = Synthetic polypeptide representing artificial human antibody VL chain
DIQMTQSPSSLSASVGDRVTFTCRASQNIRNNLAWYQLKPGKAPQLLIYSASSLETGVPSRFSGSGSGTDFTLAISSLQPEDFATYYCQQAHGFPITFGQGS

SEQ ID NO: 525 - protein, 106 aa, synthetic construct
  REGION 1..106: note = Synthetic polypeptide representing artificial human antibody VL chain
EIVMTQSPATLSVSPGERATLSCRASQSVSSNLAWYQQKPGQAPRLLIYGASTRATGIPARFSGSGSGTEFTLTISSLQSEDFAIYYCQQYNSWPAFGGGTKVEIK

SEQ ID NO: 526 - protein, 214 aa, synthetic construct
  REGION 1..214: note = Synthetic polypeptide representing artificial human antibody VL chain
DIQMTQSPSSLSASVGDRVTITCRASQSISSYLNWYQQKPGKAPKLLIYAASSLQSGVPSRFSGSGSGTDFTLTVSSLQPEDFATYYCQQSYNTPYTFGQGTKLEIKRTVAAPSVFIFPPSDEQLKSGTASVVCLLNNFYPREAKVQWKVDNALQSGNSQESVTEQDSKDSTYSLSSTLTLSKADYEKHKVYACEVTHQGLSSPVTKSFNRGEC

SEQ ID NO: 527 - protein, 214 aa, synthetic construct
  REGION 1..214: note = Synthetic polypeptide representing artificial human antibody VL chain
DIQMTQSPSSLSASVGDRVTITCRASQSISTYLNWYQQKPGMAPKLLIYAASTLQSGVPSRFSGSGSATDYTLTISSLQPEDFATYYCQQSYNTPLTFGGGTKVDIKRTVAAPSVFIFPPSDEQLKSGTASVVCLLNNFYPREAKVQWKVDNALQSGNSQESVTEQDSKDSTYSLSSTLTLSKADYEKHKLYACEVTHQGLSSPVTKSFNRGEC

SEQ ID NO: 528 - protein, 216 aa, synthetic construct
  REGION 1..216: note = Synthetic polypeptide representing artificial human antibody VL chain
EIVLTQSPGTLSLSPGERATLSCRASQSVTSSYLAWYQQKPGQAPRLLIYGASSRATGIPDRFSGSGSGTDFTLTISRLEPEDFAVYYCQQYGSSPPNSFGQGTKLEIKRTVAAPSVFIFPPSDEQLKSGTASVVCLLNNFYPREAKVQWKVDNALQSGNSQESVTEQDSKDSTYSLSSTLTLSKADYEKHKVYACEVTHQGLSSPVTKSFNRGEC

SEQ ID NO: 529 - protein, 108 aa, synthetic construct
  REGION 1..108: note = Synthetic polypeptide representing artificial human antibody VL chain
SYVLTQPPSVSVAPGKTARITCGGNNIGSKSVHWYQQKPGQAPVLVIYYDRDRPSGIPERFSGSNSGNTATLTISRVEAGDEADYYCQVWDSSSDHPVFGGGTKLTVL

SEQ ID NO: 530 - protein, 217 aa, synthetic construct
  REGION 1..217: note = Synthetic polypeptide representing artificial human antibody VL chain
NFMLTQPHSVSESPGKTVTISCTRSSGSIADKYVHWYRQRPGSSPTIVIYEDKQRPSGVPDRVSGAIDTSSNSASLTISGLKTEDEADYYCQSYDSNTHWVFGGGTKLTVLGQPKAAPSVTLFPPSSEELQANKATLVCLISDFYPGAVTVAWKADSSPVKAGVETTTPSKQSNNKYAASSYLSLTPEQWKSHRSYSCQVTHEGSTVEKTVAPTECS

SEQ ID NO: 531 - protein, 219 aa, synthetic construct
  REGION 1..219: note = Synthetic polypeptide representing artificial human antibody VL chain
DIVMTQSPLSLPVTPGEPASISCRSSQSLLHSNGYNYLDWYLQKPGQSPQLLIYLGSNRASGVPDRFSGSGSGTDFTLKISRVEAEDVGVYYCMQALETPRTFGGGTKVEIKRTVAAPSVFIFPPSDEQLKSGTASVVCLLNNFYPREAKVQWKVDNALQSGNSQESVTEQDSKDSTYSLSSTLTLSKADYEKHKVYACEVTHQGLSSPVTKSFNRGEC

SEQ ID NO: 532 - protein, 213 aa, synthetic construct
  REGION 1..213: note = Synthetic polypeptide representing artificial human antibody VL chain
DIQMTQSPSTLSASVGDRVTITCRASQSISSWLAWYQQKPGKAPKLLIYKASSLESGVPSRFSGSGSGTEFTLTISSLQPDDFATYYCQQYNSYSTFGQGTKVEIKRTVAAPSVFIFPPSDEQLKSGTASVVCLLNNFYPREAKVQWKVDNALQSGNSQESVTEQDSKDSTYSLSSTLTLSKADYEKHKVYACEVTHQGLSSPVTKSFNRGEC

SEQ ID NO: 533 - protein, 219 aa, synthetic construct
  REGION 1..219: note = Synthetic polypeptide representing artificial human antibody VL chain
GIAMTQSPRSLPVTPGEPASISCRSSQSLLYRDGEHYLDWYLQKPGQSPHLLIYSGSNRASGVPDRFSGSGSGTDFTLIISRVEAEDAGVYYCMQALQPPYTFGQGTKLEITRTVAAPSVFIFPPSDEQLKSGTASVVCLLNNFYPREAKVQWKVDNALQSGNSQESVTEQDSKDSTYSLSSTLTLSKADYEKHKLYACEVTHQGLSSPVTKSFNRGEC

SEQ ID NO: 534 - protein, 215 aa, synthetic construct
  REGION 1..215: note = Synthetic polypeptide representing artificial human antibody VL chain
DIQMTQSPSSLPASVGDRVTITCRASQSISSYLNWYQKKPGKAPKLLIDAASSLQSGVPSRFSGSGSGTDFTLTISSLQPEDFATYYCQQSYSTPPWTFGQGTKVEIKRTVAAPSVFIFPPSDEQLKSGTASVVCLLNNFYPREAKVQWKVDNALQSGNSQESVTEQDSKDSTYSLSSTLTLSKADYEKHKVYACEVTHQGLSSPVTKSFNRGEC

SEQ ID NO: 535 - protein, 220 aa, synthetic construct
  REGION 1..220: note = Synthetic polypeptide representing artificial human antibody VL chain
DIVMTQSPDSLSLSLGERATINCKSSQSLLYSSNYKNYLAWYQQKPGQPPKLLIYWASTRESGVPDRFSGSGSGTDFTLTISSLQAEDVAVYYCQQYYLVPVTFGQGTRLDIKRTVAAPSVFIFPPSDEQLKSGTASVVCLLNNFYPREAKVQWKVDNALQSGNSQESVTEQDSKDSTYSLSSTLTLSKADYEKHKVYACEVTHQGLSSPVTKSFNRGEC

SEQ ID NO: 536 - protein, 217 aa, synthetic construct
  REGION 1..217: note = Synthetic polypeptide representing artificial human antibody VL chain
ASVLTQPPSASGTPGQRVTISCSGSSSNIGSNYVYWYQQLPGTAPKLLIYRNNQRPSGVPDRFSGSKSGTSASLAISGLRSEDEADYYCAAWDDSLSGPYVFGTGTKVTVLGQPKANPTVTLFPPSSEELQANKATLVCLISDFYPGAVTVAWKADGSPVKAGVETTKPSKQSNNKYAASSYLSLTPEQWKSHRSYSCQVTHEGSTVEKTVAPTECS

SEQ ID NO: 537 - protein, 217 aa, synthetic construct
  REGION 1..217: note = Synthetic polypeptide representing artificial human antibody VL chain
QSALTQPPSASGSPGQSVTISCTGTSSDVGGYNYVSWYQQHPGKAPKLMIYEVSKRPSGVPDRFSGSKSGNTASLTVSGLQAEDEADYYCSSYAGSNNFYVFGTGTKVTVLGQPKANPTVTLFPPSSEELQANKATLVCLISDFYPGAVTVAWKADGSPVKAGVETTKPSKQSNNKYAASSYLSLTPEQWKSHRSYSCQVTHEGSTVEKTVAPTECS

SEQ ID NO: 538 - protein, 218 aa, synthetic construct
  REGION 1..218: note = Synthetic polypeptide representing artificial human antibody VL chain
QSVLTQPPSVSGAPGQRVTISCTGSNSNIGAGYDVHWYQQLPGAAPKLLIYGNGNRPSGVPDRFSGSKSDTSASLAITGLQADDEADYYCQSYDSSLSGSMIFGGGTKLTVLGQPKAAPSVTLFPPSSEELQANKATLVCLISDFYPGAVTVAWKADSSPVKAGVETTTPSKQSNNKYAASSYLSLTPEQWKSHRSYSCQVTHEGSTVEKTVAPTECS

SEQ ID NO: 539 - protein, 220 aa, synthetic construct
  REGION 1..220: note = Synthetic polypeptide representing artificial human antibody VL chain
LPVLTQPPSSSASPGESARLTCTLPSDINVTNYNIYWYQQKPGSPPRYLLYQYSDSDKGQVSGVPSRFSGSKDASANTGILLISGLQSEDEADYYCMIWSSLVVFGGGTKLTVLGQPKAAPSVTLFPPSSEELQANKATLVCLISDFYPGAVTVAWKADSSPVKAGVETTTPSKQSNNKYAASSYLSLTPEQWKSHRSYSCQVTHEGSTVEKTVAPTECS

SEQ ID NO: 540 - protein, 219 aa, synthetic construct
  REGION 1..219: note = Synthetic polypeptide representing artificial human antibody VL chain
DIVMTQSPLSLPVTPGEPASISCRSSQSLLHSDGYNYLDWFLQKPGQSPQLLIYLGSYRASGVPDRFSGSGSGTDFTLKITRVEAEDVGVYYCMQALQTPWTFGQGTKVEIKRTVAAPSVFIFPPSDEQLKSGTASVVCLLNNFYPREAKVQWKVDNALQSGNSQESVTEQDSKDSTYSLSSTLTLSKADYEKHKVYACEVTHQGLSSPVTKSFNRGEC

SEQ ID NO: 541 - protein, 214 aa, synthetic construct
  REGION 1..214: note = Synthetic polypeptide representing artificial human antibody VL chain
VIQMTQSPSSLSASVGDRVTIACRASQGIRNDLGWYQQKPGRAPKLLIYAASTLQSGVPSRFSGSGSGTDFTLTIYSLQPEDFATYYCLQNYNYPWTFGQGTKVEIQGTVAAPSVFIFPPSDEQLKSGTASVVCLLNNFYPREAKVQWKVDNALQSGNSQESVTEQDSKDSTYSLSSTLTLSKADYEKHKVYACEVTHQGLSSPVTKSFNRGEC

SEQ ID NO: 542 - protein, 219 aa, synthetic construct
  REGION 1..219: note = Synthetic polypeptide representing artificial human antibody VL chain
DIVMTQTPLSLSVTPGQPASISCKSSQSLLHSDGKTYLYWYLQKPGQSPQLLIYEVSSRFSGVPDRFSGSGSGTDFTLKISRVEAEDVGVYYCMQGIHLPRTFGQGTKLEIKRTVAAPSVFIFPPSDEQLKSGTASVVCLLNNFYPREAKVQWKVDNALQSGNSQESVTEQDSKDSTYSLSSTLTLSKADYEKHKVYACEVTHQGLSSPVTKSFNRGEC

SEQ ID NO: 543 - protein, 8 aa, synthetic construct
  REGION 1..8: note = Synthetic polypeptide representing artificial human antibody CDR-H1 region
EVTFNTYG

SEQ ID NO: 544 - protein, 8 aa, synthetic construct
  REGION 1..8: note = Synthetic polypeptide representing artificial human antibody CDR-H1 region
GFTFSSYW

SEQ ID NO: 545 - protein, 8 aa, synthetic construct
  REGION 1..8: note = Synthetic polypeptide representing artificial human antibody CDR-H1 region
GFTFEDYA

SEQ ID NO: 546 - protein, 10 aa, synthetic construct
  REGION 1..10: note = Synthetic polypeptide representing artificial human antibody CDR-H1 region
GFSLSTSGVG

SEQ ID NO: 547 - protein, 8 aa, synthetic construct
  REGION 1..8: note = Synthetic polypeptide representing artificial human antibody CDR-H1 region
GYTFTTYY

SEQ ID NO: 548 - protein, 8 aa, synthetic construct
  REGION 1..8: note = Synthetic polypeptide representing artificial human antibody CDR-H1 region
GFVFDDYA

SEQ ID NO: 549 - protein, 8 aa, synthetic construct
  REGION 1..8: note = Synthetic polypeptide representing artificial human antibody CDR-H1 region
GYTFTNYG

SEQ ID NO: 550 - protein, 8 aa, synthetic construct
  REGION 1..8: note = Synthetic polypeptide representing artificial human antibody CDR-H1 region
GFTFDDYA

SEQ ID NO: 551 - protein, 8 aa, synthetic construct
  REGION 1..8: note = Synthetic polypeptide representing artificial human antibody CDR-H1 region
GFTFSYYG

SEQ ID NO: 552 - protein, 8 aa, synthetic construct
  REGION 1..8: note = Synthetic polypeptide representing artificial human antibody CDR-H1 region
GFPFGDYA

SEQ ID NO: 553 - protein, 8 aa, synthetic construct
  REGION 1..8: note = Synthetic polypeptide representing artificial human antibody CDR-H1 region
GYIDINNG

SEQ ID NO: 554 - protein, 8 aa, synthetic construct
  REGION 1..8: note = Synthetic polypeptide representing artificial human antibody CDR-H1 region
GFTFTRHG

SEQ ID NO: 555 - protein, 8 aa, synthetic construct
  REGION 1..8: note = Synthetic polypeptide representing artificial human antibody CDR-H1 region
RFTFSSYA

SEQ ID NO: 556 - protein, 10 aa, synthetic construct
  REGION 1..10: note = Synthetic polypeptide representing artificial human antibody CDR-H1 region
GDGVSSNSAS

SEQ ID NO: 557 - protein, 8 aa, synthetic construct
  REGION 1..8: note = Synthetic polypeptide representing artificial human antibody CDR-H1 region
GFAFSSNG

SEQ ID NO: 558 - protein, 8 aa, synthetic construct
  REGION 1..8: note = Synthetic polypeptide representing artificial human antibody CDR-H1 region
GITFSSYD

SEQ ID NO: 559 - protein, 8 aa, synthetic construct
  REGION 1..8: note = Synthetic polypeptide representing artificial human antibody CDR-H1 region
GYNFTNYG

SEQ ID NO: 560 - protein, 8 aa, synthetic construct
  REGION 1..8: note = Synthetic polypeptide representing artificial human antibody CDR-H1 region
GFSFRSYE

SEQ ID NO: 561 - protein, 8 aa, synthetic construct
  REGION 1..8: note = Synthetic polypeptide representing artificial human antibody CDR-H1 region
GYIFTSYA

SEQ ID NO: 562 - protein, 9 aa, synthetic construct
  REGION 1..9: note = Synthetic polypeptide representing artificial human antibody CDR-H1 region
GYLISSGYY

SEQ ID NO: 563 - protein, 10 aa, synthetic construct
  REGION 1..10: note = Synthetic polypeptide representing artificial human antibody CDR-H1 region
GFSLNTSGVG

SEQ ID NO: 564 - protein, 8 aa, synthetic construct
  REGION 1..8: note = Synthetic polypeptide representing artificial human antibody CDR-H1 region
GFTFSNYS

SEQ ID NO: 565 - protein, 8 aa, synthetic construct
  REGION 1..8: note = Synthetic polypeptide representing artificial human antibody CDR-H1 region
GFTFSSYS

SEQ ID NO: 566 - protein, 8 aa, synthetic construct
  REGION 1..8: note = Synthetic polypeptide representing artificial human antibody CDR-H1 region
GDSMSFYY

SEQ ID NO: 567 - protein, 10 aa, synthetic construct
  REGION 1..10: note = Synthetic polypeptide representing artificial human antibody CDR-H1 region
GGSISSGSYY

SEQ ID NO: 568 - protein, 8 aa, synthetic construct
  REGION 1..8: note = Synthetic polypeptide representing artificial human antibody CDR-H1 region
GFSFSSYS

SEQ ID NO: 569 - protein, 10 aa, synthetic construct
  REGION 1..10: note = Synthetic polypeptide representing artificial human antibody CDR-H1 region
GGSISRSPYF

SEQ ID NO: 570 - protein, 8 aa, synthetic construct
  REGION 1..8: note = Synthetic polypeptide representing artificial human antibody CDR-H1 region
GFTFTSYG

SEQ ID NO: 571 - protein, 8 aa, synthetic construct
  REGION 1..8: note = Synthetic polypeptide representing artificial human antibody CDR-H1 region
SGSSGSYY

SEQ ID NO: 572 - protein, 8 aa, synthetic construct
  REGION 1..8: note = Synthetic polypeptide representing artificial human antibody CDR-H1 region
GYNFRDYY

SEQ ID NO: 573 - protein, 10 aa, synthetic construct
  REGION 1..10: note = Synthetic polypeptide representing artificial human antibody CDR-H1 region
GGSINSGDYH

SEQ ID NO: 574 - protein, 10 aa, synthetic construct
  REGION 1..10: note = Synthetic polypeptide representing artificial human antibody CDR-H1 region
GGSISSSGYY

SEQ ID NO: 575 - protein, 8 aa, synthetic construct
  REGION 1..8: note = Synthetic polypeptide representing artificial human antibody CDR-H1 region
GFTFSSYG

SEQ ID NO: 576 - protein, 10 aa, synthetic construct
  REGION 1..10: note = Synthetic polypeptide representing artificial human antibody CDR-H1 region
GFSLTTSGVG

SEQ ID NO: 577 - protein, 8 aa, synthetic construct
  REGION 1..8: note = Synthetic polypeptide representing artificial human antibody CDR-H1 region
GFTFSTYE

SEQ ID NO: 578 - protein, 8 aa, synthetic construct
  REGION 1..8: note = Synthetic polypeptide representing artificial human antibody CDR-H1 region
GGTFSSYA

SEQ ID NO: 579 - protein, 10 aa, synthetic construct
  REGION 1..10: note = Synthetic polypeptide representing artificial human antibody CDR-H1 region
GGSISSDNYY

SEQ ID NO: 580 - protein, 8 aa, synthetic construct
  REGION 1..8: note = Synthetic polypeptide representing artificial human antibody CDR-H1 region
GASISSYY

SEQ ID NO: 581 - protein, 8 aa, synthetic construct
  REGION 1..8: note = Synthetic polypeptide representing artificial human antibody CDR-H1 region
GNTFTTYT

SEQ ID NO: 582 - protein, 8 aa, synthetic construct
  REGION 1..8: note = Synthetic polypeptide representing artificial human antibody CDR-H1 region
GFTFSSYA

SEQ ID NO: 583 - protein, 8 aa, synthetic construct
  REGION 1..8: note = Synthetic polypeptide representing artificial human antibody CDR-H1 region
GFTFDDYG

SEQ ID NO: 584 - protein, 8 aa, synthetic construct
  REGION 1..8: note = Synthetic polypeptide representing artificial human antibody CDR-H1 region
GFTFSSYG

SEQ ID NO: 585 - protein, 10 aa, synthetic construct
  REGION 1..10: note = Synthetic polypeptide representing artificial human antibody CDR-H1 region
GGSISSGGYY

SEQ ID NO: 586 - protein, 8 aa, synthetic construct
  REGION 1..8: note = Synthetic polypeptide representing artificial human antibody CDR-H1 region
GYTFTGYY

SEQ ID NO: 587 - protein, 8 aa, synthetic construct
  REGION 1..8: note = Synthetic polypeptide representing artificial human antibody CDR-H1 region
GFTFSSYD

SEQ ID NO: 588 - protein, 8 aa, synthetic construct
  REGION 1..8: note = Synthetic polypeptide representing artificial human antibody CDR-H1 region
GFTFRSYG

SEQ ID NO: 589 - protein, 8 aa, synthetic construct
  REGION 1..8: note = Synthetic polypeptide representing artificial human antibody CDR-H1 region
GFTFSDYY

SEQ ID NO: 590 - protein, 8 aa, synthetic construct
  REGION 1..8: note = Synthetic polypeptide representing artificial human antibody CDR-H1 region
GFTFSSYH

SEQ ID NO: 591 - protein, 8 aa, synthetic construct
  REGION 1..8: note = Synthetic polypeptide representing artificial human antibody CDR-H1 region
GFTFSSYA

SEQ ID NO: 592 - protein, 8 aa, synthetic construct
  REGION 1..8: note = Synthetic polypeptide representing artificial human antibody CDR-H1 region
GFTLEEFA

SEQ ID NO: 593 - protein, 8 aa, synthetic construct
  REGION 1..8: note = Synthetic polypeptide representing artificial human antibody CDR-H1 region
GGSISDYY

SEQ ID NO: 594 - protein, 8 aa, synthetic construct
  REGION 1..8: note = Synthetic polypeptide representing artificial human antibody CDR-H1 region
GGTFSSYA

SEQ ID NO: 595 - protein, 8 aa, synthetic construct
  REGION 1..8: note = Synthetic polypeptide representing artificial human antibody CDR-H1 region
GYTFSSYG

SEQ ID NO: 596 - protein, 8 aa, synthetic construct
  REGION 1..8: note = Synthetic polypeptide representing artificial human antibody CDR-H1 region
GFTFRSYE

SEQ ID NO: 597 - protein, 8 aa, synthetic construct
  REGION 1..8: note = Synthetic polypeptide representing artificial human antibody CDR-H1 region
GGTFSSYA

SEQ ID NO: 598 - protein, 8 aa, synthetic construct
  REGION 1..8: note = Synthetic polypeptide representing artificial human antibody CDR-H1 region
GDSFNKYF

SEQ ID NO: 599 - protein, 8 aa, synthetic construct
  REGION 1..8: note = Synthetic polypeptide representing artificial human antibody CDR-H1 region
GFTFSTYG

SEQ ID NO: 600 - protein, 8 aa, synthetic construct
  REGION 1..8: note = Synthetic polypeptide representing artificial human antibody CDR-H1 region
GFAFSSYA

SEQ ID NO: 601 - protein, 8 aa, synthetic construct
  REGION 1..8: note = Synthetic polypeptide representing artificial human antibody CDR-H1 region
GFTFSNHA

SEQ ID NO: 602 - protein, 8 aa, synthetic construct
  REGION 1..8: note = Synthetic polypeptide representing artificial human antibody CDR-H1 region
GFTFSSHG

SEQ ID NO: 603 - protein, 10 aa, synthetic construct
  REGION 1..10: note = Synthetic polypeptide representing artificial human antibody CDR-H1 region
GGSVDNVDSY

SEQ ID NO: 604 - protein, 8 aa, synthetic construct
  REGION 1..8: note = Synthetic polypeptide representing artificial human antibody CDR-H1 region
GYSFTTYW

SEQ ID NO: 605 - protein, 10 aa, synthetic construct
  REGION 1..10: note = Synthetic polypeptide representing artificial human antibody CDR-H1 region
GDSISSGSYY

SEQ ID NO: 606 - protein, 10 aa, synthetic construct
  REGION 1..10: note = Synthetic polypeptide representing artificial human antibody CDR-H1 region
GDSVSSNSAA

SEQ ID NO: 607 - protein, 8 aa, synthetic construct
  REGION 1..8: note = Synthetic polypeptide representing artificial human antibody CDR-H1 region
GYTLSELS

SEQ ID NO: 608 - protein, 8 aa, synthetic construct
  REGION 1..8: note = Synthetic polypeptide representing artificial human antibody CDR-H1 region
GFTFSSYS

SEQ ID NO: 609 - protein, 8 aa, synthetic construct
  REGION 1..8: note = Synthetic polypeptide representing artificial human antibody CDR-H1 region
GFTFSNYA

SEQ ID NO: 610 - protein, 8 aa, synthetic construct
  REGION 1..8: note = Synthetic polypeptide representing artificial human antibody CDR-H1 region
GGPFSSYT

SEQ ID NO: 611 - protein, 10 aa, synthetic construct
  REGION 1..10: note = Synthetic polypeptide representing artificial human antibody CDR-H1 region
GGSVNTGTSY

SEQ ID NO: 612 - protein, 8 aa, synthetic construct
  REGION 1..8: note = Synthetic polypeptide representing artificial human antibody CDR-H1 region
GFHFGSHG

SEQ ID NO: 613 - protein, 10 aa, synthetic construct
  REGION 1..10: note = Synthetic polypeptide representing artificial human antibody CDR-H1 region
GGSITTGSYY

SEQ ID NO: 614 - protein, 8 aa, synthetic construct
  REGION 1..8: note = Synthetic polypeptide representing artificial human antibody CDR-H1 region
GFTFDDYA

SEQ ID NO: 615 - protein, 8 aa, synthetic construct
  REGION 1..8: note = Synthetic polypeptide representing artificial human antibody CDR-H1 region
GASMNNYY

SEQ ID NO: 616 - protein, 10 aa, synthetic construct
  REGION 1..10: note = Synthetic polypeptide representing artificial human antibody CDR-H1 region
GFSLTTTDVG

SEQ ID NO: 617 - protein, 8 aa, synthetic construct
  REGION 1..8: note = Synthetic polypeptide representing artificial human antibody CDR-H1 region
GFTFSSYS

SEQ ID NO: 618 - protein, 8 aa, synthetic construct
  REGION 1..8: note = Synthetic polypeptide representing artificial human antibody CDR-H1 region
GYNFISHW

SEQ ID NO: 619 - protein, 8 aa, synthetic construct
  REGION 1..8: note = Synthetic polypeptide representing artificial human antibody CDR-H1 region
GYSFTSFW

SEQ ID NO: 620 - protein, 8 aa, synthetic construct
  REGION 1..8: note = Synthetic polypeptide representing artificial human antibody CDR-H1 region
GGSIDSYY

SEQ ID NO: 621 - protein, 8 aa, synthetic construct
  REGION 1..8: note = Synthetic polypeptide representing artificial human antibody CDR-H1 region
GGIFSYFA

SEQ ID NO: 622 - protein, 8 aa, synthetic construct
  REGION 1..8: note = Synthetic polypeptide representing artificial human antibody CDR-H1 region
EFSFQYFS

SEQ ID NO: 623 - protein, 9 aa, synthetic construct
  REGION 1..9: note = Synthetic polypeptide representing artificial human antibody CDR-H1 region
GYTLNNDVA

SEQ ID NO: 624 - protein, 8 aa, synthetic construct
  REGION 1..8: note = Synthetic polypeptide representing artificial human antibody CDR-H1 region
GFRFNYYW

SEQ ID NO: 625 - protein, 10 aa, synthetic construct
  REGION 1..10: note = Synthetic polypeptide representing artificial human antibody CDR-H1 region
GGSISGDKNF

SEQ ID NO: 626 - protein, 8 aa, synthetic construct
  REGION 1..8: note = Synthetic polypeptide representing artificial human antibody CDR-H1 region
GFTFSDYE

SEQ ID NO: 627 - protein, 8 aa, synthetic construct
  REGION 1..8: note = Synthetic polypeptide representing artificial human antibody CDR-H1 region
GFPPRSFA

SEQ ID NO: 628 - protein, 8 aa, synthetic construct
  REGION 1..8: note = Synthetic polypeptide representing artificial human antibody CDR-H1 region
GFTFSNYG

SEQ ID NO: 629 - protein, 8 aa, synthetic construct
  REGION 1..8: note = Synthetic polypeptide representing artificial human antibody CDR-H1 region
GFTFDDYT

SEQ ID NO: 630 - protein, 8 aa, synthetic construct
  REGION 1..8: note = Synthetic polypeptide representing artificial human antibody CDR-H1 region
GDTFPNYV

SEQ ID NO: 631 - protein, 8 aa, synthetic construct
  REGION 1..8: note = Synthetic polypeptide representing artificial human antibody CDR-H1 region
GFTFDDYA

SEQ ID NO: 632 - protein, 8 aa, synthetic construct
  REGION 1..8: note = Synthetic polypeptide representing artificial human antibody CDR-H1 region
GFTFSSYA

SEQ ID NO: 633 - protein, 8 aa, synthetic construct
  REGION 1..8: note = Synthetic polypeptide representing artificial human antibody CDR-H1 region
GFTFSNYD

SEQ ID NO: 634 - protein, 8 aa, synthetic construct
  REGION 1..8: note = Synthetic polypeptide representing artificial human antibody CDR-H1 region
GFTFSPYS

SEQ ID NO: 635 - protein, 10 aa, synthetic construct
  REGION 1..10: note = Synthetic polypeptide representing artificial human antibody CDR-H1 region
GGSITSGSYF

SEQ ID NO: 636 - protein, 10 aa, synthetic construct
  REGION 1..10: note = Synthetic polypeptide representing artificial human antibody CDR-H1 region
GGSVSSSSYY

SEQ ID NO: 637 - protein, 8 aa, synthetic construct
  REGION 1..8: note = Synthetic polypeptide representing artificial human antibody CDR-H1 region
GFTFSNYD

SEQ ID NO: 638 - protein, 8 aa, synthetic construct
  REGION 1..8: note = Synthetic polypeptide representing artificial human antibody CDR-H1 region
GYAFIGNW

SEQ ID NO: 639 - protein, 10 aa, synthetic construct
  REGION 1..10: note = Synthetic polypeptide representing artificial human antibody CDR-H1 region
GFTFSFSSYA

SEQ ID NO: 640 - protein, 8 aa, synthetic construct
  REGION 1..8: note = Synthetic polypeptide representing artificial human antibody CDR-H1 region
GFTFNNYE

SEQ ID NO: 641 - protein, 8 aa, synthetic construct
  REGION 1..8: note = Synthetic polypeptide representing artificial human antibody CDR-H1 region
GFTFSSNW

SEQ ID NO: 642 - protein, 10 aa, synthetic construct
  REGION 1..10: note = Synthetic polypeptide representing artificial human antibody CDR-H1 region
GGSISSGGYY

SEQ ID NO: 643 - protein, 8 aa, synthetic construct
  REGION 1..8: note = Synthetic polypeptide representing artificial human antibody CDR-H1 region
GFTFSSYG

SEQ ID NO: 644 - protein, 8 aa, synthetic construct
  REGION 1..8: note = Synthetic polypeptide representing artificial human antibody CDR-H1 region
GFTFSDYY

SEQ ID NO: 645 - protein, 10 aa, synthetic construct
  REGION 1..10: note = Synthetic polypeptide representing artificial human antibody CDR-H1 region
GGSISSGGYP

SEQ ID NO: 646 - protein, 8 aa, synthetic construct
  REGION 1..8: note = Synthetic polypeptide representing artificial human antibody CDR-H1 region
GGSISIYY

SEQ ID NO: 647 - protein, 8 aa, synthetic construct
  REGION 1..8: note = Synthetic polypeptide representing artificial human antibody CDR-H1 region
NSSISSYY

SEQ ID NO: 648 - protein, 8 aa, synthetic construct
  REGION 1..8: note = Synthetic polypeptide representing artificial human antibody CDR-H1 region
GFTFNSYW

SEQ ID NO: 649 - protein, 8 aa, synthetic construct
  REGION 1..8: note = Synthetic polypeptide representing artificial human antibody CDR-H1 region
GFTFDDYA

SEQ ID NO: 650 - protein, 8 aa, synthetic construct
  REGION 1..8: note = Synthetic polypeptide representing artificial human antibody CDR-H1 region
GYRFNAYW

SEQ ID NO: 651 - protein, 10 aa, synthetic construct
  REGION 1..10: note = Synthetic polypeptide representing artificial human antibody CDR-H1 region
GDSVSSTSGA

SEQ ID NO: 652 - protein, 10 aa, synthetic construct
  REGION 1..10: note = Synthetic polypeptide representing artificial human antibody CDR-H1 region
GDSVSSNSAA

SEQ ID NO: 653 - protein, 8 aa, synthetic construct
  REGION 1..8: note = Synthetic polypeptide representing artificial human antibody CDR-H1 region
GGSISSYY

SEQ ID NO: 654 - protein, 8 aa, synthetic construct
  REGION 1..8: note = Synthetic polypeptide representing artificial human antibody CDR-H1 region
GYSFTSYW

SEQ ID NO: 655 - protein, 8 aa, synthetic construct
  REGION 1..8: note = Synthetic polypeptide representing artificial human antibody CDR-H1 region
GFTFSSYG

SEQ ID NO: 656 - protein, 8 aa, synthetic construct
  REGION 1..8: note = Synthetic polypeptide representing artificial human antibody CDR-H1 region
GFTFRSYS

SEQ ID NO: 657 - protein, 8 aa, synthetic construct
  REGION 1..8: note = Synthetic polypeptide representing artificial human antibody CDR-H1 region
GGTFSSYT

SEQ ID NO: 658 - protein, 8 aa, synthetic construct
  REGION 1..8: note = Synthetic polypeptide representing artificial human antibody CDR-H1 region
GFSFSRYN

SEQ ID NO: 659 - protein, 8 aa, synthetic construct
  REGION 1..8: note = Synthetic polypeptide representing artificial human antibody CDR-H1 region
GFTFTNYA

SEQ ID NO: 660 - protein, 8 aa, synthetic construct
  REGION 1..8: note = Synthetic polypeptide representing artificial human antibody CDR-H1 region
GFSFSSFG

SEQ ID NO: 661 - protein, 8 aa, synthetic construct
  REGION 1..8: note = Synthetic polypeptide representing artificial human antibody CDR-H1 region
GFTFSSYA

SEQ ID NO: 662 - protein, 8 aa, synthetic construct
  REGION 1..8: note = Synthetic polypeptide representing artificial human antibody CDR-H1 region
GFTFSSHG

SEQ ID NO: 663 - protein, 8 aa, synthetic construct
  REGION 1..8: note = Synthetic polypeptide representing artificial human antibody CDR-H1 region
GFSFSTYW

SEQ ID NO: 664 - protein, 8 aa, synthetic construct
  REGION 1..8: note = Synthetic polypeptide representing artificial human antibody CDR-H1 region
GFTFNNYW

SEQ ID NO: 665 - protein, 8 aa, synthetic construct
  REGION 1..8: note = Synthetic polypeptide representing artificial human antibody CDR-H1 region
GFTFSHGW

SEQ ID NO: 666 - protein, 8 aa, synthetic construct
  REGION 1..8: note = Synthetic polypeptide representing artificial human antibody CDR-H1 region
GGSIRNDY

SEQ ID NO: 667 - protein, 8 aa, synthetic construct
  REGION 1..8: note = Synthetic polypeptide representing artificial human antibody CDR-H1 region
GGTFSSYA

SEQ ID NO: 668 - protein, 10 aa, synthetic construct
  REGION 1..10: note = Synthetic polypeptide representing artificial human antibody CDR-H1 region
GGSISSSNYF

SEQ ID NO: 669 - protein, 8 aa, synthetic construct
  REGION 1..8: note = Synthetic polypeptide representing artificial human antibody CDR-H1 region
GFTFSDYW

SEQ ID NO: 670 - protein, 10 aa, synthetic construct
  REGION 1..10: note = Synthetic polypeptide representing artificial human antibody CDR-H1 region
DVSIISSFYY

SEQ ID NO: 671 - protein, 10 aa, synthetic construct
  REGION 1..10: note = Synthetic polypeptide representing artificial human antibody CDR-H1 region
GASVSSGSYY

SEQ ID NO: 672 - protein, 8 aa, synthetic construct
  REGION 1..8: note = Synthetic polypeptide representing artificial human antibody CDR-H1 region
GGTFSGYG

SEQ ID NO: 673 - protein, 8 aa, synthetic construct
  REGION 1..8: note = Synthetic polypeptide representing artificial human antibody CDR-H1 region
GFTFSSYW

SEQ ID NO: 674 - protein, 10 aa, synthetic construct
  REGION 1..10: note = Synthetic polypeptide representing artificial human antibody CDR-H1 region
GGSISSGDYY

SEQ ID NO: 675 - protein, 8 aa, synthetic construct
  REGION 1..8: note = Synthetic polypeptide representing artificial human antibody CDR-H1 region
GFTFSSYA

SEQ ID NO: 676 - protein, 8 aa, synthetic construct
  REGION 1..8: note = Synthetic polypeptide representing artificial human antibody CDR-H1 region
GFTFSSYA

SEQ ID NO: 677 - protein, 8 aa, synthetic construct
  REGION 1..8: note = Synthetic polypeptide representing artificial human antibody CDR-H1 region
GFTLSSYA

SEQ ID NO: 678 - protein, 10 aa, synthetic construct
  REGION 1..10: note = Synthetic polypeptide representing artificial human antibody CDR-H1 region
GGSISSGGYS

SEQ ID NO: 679 - protein, 8 aa, synthetic construct
  REGION 1..8: note = Synthetic polypeptide representing artificial human antibody CDR-H1 region
GFTFSNSA

SEQ ID NO: 680 - protein, 8 aa, synthetic construct
  REGION 1..8: note = Synthetic polypeptide representing artificial human antibody CDR-H1 region
GYTFTSHY

SEQ ID NO: 681 - protein, 8 aa, synthetic construct
  REGION 1..8: note = Synthetic polypeptide representing artificial human antibody CDR-H1 region
GFTFSAYW

SEQ ID NO: 682 - protein, 8 aa, synthetic construct
  REGION 1..8: note = Synthetic polypeptide representing artificial human antibody CDR-H1 region
GYSLTEIS

SEQ ID NO: 683 - protein, 10 aa, synthetic construct
  REGION 1..10: note = Synthetic polypeptide representing artificial human antibody CDR-H1 region
GGSIRSSAPF

SEQ ID NO: 684 - protein, 8 aa, synthetic construct
  REGION 1..8: note = Synthetic polypeptide representing artificial human antibody CDR-H1 region
GYIFTTYV

SEQ ID NO: 685 - protein, 8 aa, synthetic construct
  REGION 1..8: note = Synthetic polypeptide representing artificial human antibody CDR-H1 region
GFTFDDYA

SEQ ID NO: 686 - protein, 8 aa, synthetic construct
  REGION 1..8: note = Synthetic polypeptide representing artificial human antibody CDR-H1 region
GFTFNNYW

SEQ ID NO: 687 - protein, 8 aa, synthetic construct
  REGION 1..8: note = Synthetic polypeptide representing artificial human antibody CDR-H1 region
GDSVSSFY

SEQ ID NO: 688 - protein, 8 aa, synthetic construct
  REGION 1..8: note = Synthetic polypeptide representing artificial human antibody CDR-H1 region
GYNFNDDR

SEQ ID NO: 689 - protein, 8 aa, synthetic construct
  REGION 1..8: note = Synthetic polypeptide representing artificial human antibody CDR-H1 region
GFTVSTNY

SEQ ID NO: 690 - protein, 8 aa, synthetic construct
  REGION 1..8: note = Synthetic polypeptide representing artificial human antibody CDR-H1 region
GFTFSDHY

SEQ ID NO: 691 - protein, 8 aa, synthetic construct
  REGION 1..8: note = Synthetic polypeptide representing artificial human antibody CDR-H1 region
GFTFRDYG

SEQ ID NO: 692 - protein, 8 aa, synthetic construct
  REGION 1..8: note = Synthetic polypeptide representing artificial human antibody CDR-H1 region
GFDIRSYT

SEQ ID NO: 693 - protein, 8 aa, synthetic construct
  REGION 1..8: note = Synthetic polypeptide representing artificial human antibody CDR-H1 region
GYTFTDYY

SEQ ID NO: 694 - protein, 8 aa, synthetic construct
  REGION 1..8: note = Synthetic polypeptide representing artificial human antibody CDR-H1 region
GFTFSNYA

SEQ ID NO: 695 - protein, 8 aa, synthetic construct
  REGION 1..8: note = Synthetic polypeptide representing artificial human antibody CDR-H1 region
GFNFNSYT

SEQ ID NO: 696 - protein, 8 aa, synthetic construct
  REGION 1..8: note = Synthetic polypeptide representing artificial human antibody CDR-H1 region
GFTFDDYA

SEQ ID NO: 697 - protein, 8 aa, synthetic construct
  REGION 1..8: note = Synthetic polypeptide representing artificial human antibody CDR-H1 region
GGTFSSYG

SEQ ID NO: 698 - protein, 8 aa, synthetic construct
  REGION 1..8: note = Synthetic polypeptide representing artificial human antibody CDR-H1 region
GLTFNRFA

SEQ ID NO: 699 - protein, 9 aa, synthetic construct
  REGION 1..9: note = Synthetic polypeptide representing artificial human antibody CDR-H1 region
GYSISTAYY

SEQ ID NO: 700 - protein, 8 aa, synthetic construct
  REGION 1..8: note = Synthetic polypeptide representing artificial human antibody CDR-H1 region
GGNVRSYS

SEQ ID NO: 701 - protein, 8 aa, synthetic construct
  REGION 1..8: note = Synthetic polypeptide representing artificial human antibody CDR-H1 region
GDSISSNY

SEQ ID NO: 702 - protein, 8 aa, synthetic construct
  REGION 1..8: note = Synthetic polypeptide representing artificial human antibody CDR-H1 region
GYRFSNFG

SEQ ID NO: 703 - protein, 8 aa, synthetic construct
  REGION 1..8: note = Synthetic polypeptide representing artificial human antibody CDR-H1 region
GYTFTNYA

SEQ ID NO: 704 - protein, 10 aa, synthetic construct
  REGION 1..10: note = Synthetic polypeptide representing artificial human antibody CDR-H1 region
GDSISSSSYF

SEQ ID NO: 705 - protein, 8 aa, synthetic construct
  REGION 1..8: note = Synthetic polypeptide representing artificial human antibody CDR-H1 region
GFTFSNYG

SEQ ID NO: 706 - protein, 8 aa, synthetic construct
  REGION 1..8: note = Synthetic polypeptide representing artificial human antibody CDR-H1 region
GGSFNTYA

SEQ ID NO: 707 - protein, 8 aa, synthetic construct
  REGION 1..8: note = Synthetic polypeptide representing artificial human antibody CDR-H1 region
GDTFTSFA

SEQ ID NO: 708 - protein, 10 aa, synthetic construct
  REGION 1..10: note = Synthetic polypeptide representing artificial human antibody CDR-H1 region
GDSISNGDYC

SEQ ID NO: 709 - protein, 8 aa, synthetic construct
  REGION 1..8: note = Synthetic polypeptide representing artificial human antibody CDR-H1 region
GFTFRSYW

SEQ ID NO: 710 - protein, 8 aa, synthetic construct
  REGION 1..8: note = Synthetic polypeptide representing artificial human antibody CDR-H1 region
GFTYDSYV

SEQ ID NO: 711 - protein, 10 aa, synthetic construct
  REGION 1..10: note = Synthetic polypeptide representing artificial human antibody CDR-H1 region
SGSVSSGSHY

SEQ ID NO: 712 - protein, 8 aa, synthetic construct
  REGION 1..8: note = Synthetic polypeptide representing artificial human antibody CDR-H1 region
GYSFTGYY

SEQ ID NO: 713 - protein, 8 aa, synthetic construct
  REGION 1..8: note = Synthetic polypeptide representing artificial human antibody CDR-H1 region
GFTFSNYG

SEQ ID NO: 714 - protein, 8 aa, synthetic construct
  REGION 1..8: note = Synthetic polypeptide representing artificial human antibody CDR-H1 region
GFTFSNYN

SEQ ID NO: 715 - protein, 10 aa, synthetic construct
  REGION 1..10: note = Synthetic polypeptide representing artificial human antibody CDR-H1 region
GGSISSSSYY

SEQ ID NO: 716 - protein, 8 aa, synthetic construct
  REGION 1..8: note = Synthetic polypeptide representing artificial human antibody CDR-H1 region
GFTFSNAW

SEQ ID NO: 717 - protein, 8 aa, synthetic construct
  REGION 1..8: note = Synthetic polypeptide representing artificial human antibody CDR-H1 region
GYTFTNYF

SEQ ID NO: 718 - protein, 8 aa, synthetic construct
  REGION 1..8: note = Synthetic polypeptide representing artificial human antibody CDR-H1 region
GGTFNNYG

SEQ ID NO: 719 - protein, 8 aa, synthetic construct
  REGION 1..8: note = Synthetic polypeptide representing artificial human antibody CDR-H1 region
GFTFSSYE

SEQ ID NO: 720 - protein, 8 aa, synthetic construct
  REGION 1..8: note = Synthetic polypeptide representing artificial human antibody CDR-H1 region
GFTFTTYA

SEQ ID NO: 721 - protein, 8 aa, synthetic construct
  REGION 1..8: note = Synthetic polypeptide representing artificial human antibody CDR-H1 region
GYTFTSYW

SEQ ID NO: 722 - protein, 8 aa, synthetic construct
  REGION 1..8: note = Synthetic polypeptide representing artificial human antibody CDR-H1 region
GLTFSIYS

SEQ ID NO: 723 - protein, 10 aa, synthetic construct
  REGION 1..10: note = Synthetic polypeptide representing artificial human antibody CDR-H1 region
GFSLSNARMG

SEQ ID NO: 724 - protein, 8 aa, synthetic construct
  REGION 1..8: note = Synthetic polypeptide representing artificial human antibody CDR-H1 region
GYTFTVYY

SEQ ID NO: 725 - protein, 8 aa, synthetic construct
  REGION 1..8: note = Synthetic polypeptide representing artificial human antibody CDR-H1 region
GYTFTSYG

SEQ ID NO: 726 - protein, 10 aa, synthetic construct
  REGION 1..10: note = Synthetic polypeptide representing artificial human antibody CDR-H1 region
GDSVSSTSAA

SEQ ID NO: 727 - protein, 9 aa, synthetic construct
  REGION 1..9: note = Synthetic polypeptide representing artificial human antibody CDR-H1 region
GGSISSSNC

SEQ ID NO: 728 - protein, 8 aa, synthetic construct
  REGION 1..8: note = Synthetic polypeptide representing artificial human antibody CDR-H1 region
GFTVSSNY

SEQ ID NO: 729 - protein, 8 aa, synthetic construct
  REGION 1..8: note = Synthetic polypeptide representing artificial human antibody CDR-H1 region
GYTFTTYY

SEQ ID NO: 730 - protein, 10 aa, synthetic construct
  REGION 1..10: note = Synthetic polypeptide representing artificial human antibody CDR-H1 region
GGSVSSGSYY

SEQ ID NO: 731 - protein, 10 aa, synthetic construct
  REGION 1..10: note = Synthetic polypeptide representing artificial human antibody CDR-H1 region
GGSISSSFFY

SEQ ID NO: 732 - protein, 8 aa, synthetic construct
  REGION 1..8: note = Synthetic polypeptide representing artificial human antibody CDR-H1 region
GFTFSSYA

SEQ ID NO: 733 - protein, 8 aa, synthetic construct
  REGION 1..8: note = Synthetic polypeptide representing artificial human antibody CDR-H1 region
GFTFSTYV

SEQ ID NO: 734 - protein, 10 aa, synthetic construct
  REGION 1..10: note = Synthetic polypeptide representing artificial human antibody CDR-H1 region
GGSISSSSYY

SEQ ID NO: 735 - protein, 8 aa, synthetic construct
  REGION 1..8: note = Synthetic polypeptide representing artificial human antibody CDR-H1 region
GYTFTGYY

SEQ ID NO: 736 - protein, 8 aa, synthetic construct
  REGION 1..8: note = Synthetic polypeptide representing artificial human antibody CDR-H1 region
GYSFTSYW

SEQ ID NO: 737 - protein, 8 aa, synthetic construct
  REGION 1..8: note = Synthetic polypeptide representing artificial human antibody CDR-H1 region
GYSFTTYW

SEQ ID NO: 738 - protein, 8 aa, synthetic construct
  REGION 1..8: note = Synthetic polypeptide representing artificial human antibody CDR-H1 region
GFTFRIYA

SEQ ID NO: 739 - protein, 8 aa, synthetic construct
  REGION 1..8: note = Synthetic polypeptide representing artificial human antibody CDR-H1 region
GYTFTSYY

SEQ ID NO: 740 - protein, 8 aa, synthetic construct
  REGION 1..8: note = Synthetic polypeptide representing artificial human antibody CDR-H1 region
GLDFRDYY

SEQ ID NO: 741 - protein, 8 aa, synthetic construct
  REGION 1..8: note = Synthetic polypeptide representing artificial human antibody CDR-H1 region
GFTFISYA

SEQ ID NO: 742 - protein, 8 aa, synthetic construct
  REGION 1..8: note = Synthetic polypeptide representing artificial human antibody CDR-H1 region
GYTFTSHA

SEQ ID NO: 743 - protein, 8 aa, synthetic construct
  REGION 1..8: note = Synthetic polypeptide representing artificial human antibody CDR-H1 region
GYTFTNYA

SEQ ID NO: 744 - protein, 8 aa, synthetic construct
  REGION 1..8: note = Synthetic polypeptide representing artificial human antibody CDR-H1 region
GFTFSNFA

SEQ ID NO: 745 - protein, 8 aa, synthetic construct
  REGION 1..8: note = Synthetic polypeptide representing artificial human antibody CDR-H1 region
GFTFSHYA

SEQ ID NO: 746 - protein, 8 aa, synthetic construct
  REGION 1..8: note = Synthetic polypeptide representing artificial human antibody CDR-H1 region
GFTFSSYS

SEQ ID NO: 747 - protein, 10 aa, synthetic construct
  REGION 1..10: note = Synthetic polypeptide representing artificial human antibody CDR-H1 region
GFSLSTNGVG

SEQ ID NO: 748 - protein, 10 aa, synthetic construct
  REGION 1..10: note = Synthetic polypeptide representing artificial human antibody CDR-H1 region
GLSLSTSGVA

SEQ ID NO: 749 - protein, 10 aa, synthetic construct
  REGION 1..10: note = Synthetic polypeptide representing artificial human antibody CDR-H1 region
GGSISSGGYC

SEQ ID NO: 750 - protein, 8 aa, synthetic construct
  REGION 1..8: note = Synthetic polypeptide representing artificial human antibody CDR-H1 region
GFTFSSYW

SEQ ID NO: 751 - protein, 8 aa, synthetic construct
  REGION 1..8: note = Synthetic polypeptide representing artificial human antibody CDR-H1 region
RGTFSNHA

SEQ ID NO: 752 - protein, 8 aa, synthetic construct
  REGION 1..8: note = Synthetic polypeptide representing artificial human antibody CDR-H1 region
GGTFNFYA

SEQ ID NO: 753 - protein, 8 aa, synthetic construct
  REGION 1..8: note = Synthetic polypeptide representing artificial human antibody CDR-H1 region
GYNFIDNA

SEQ ID NO: 754 - protein, 8 aa, synthetic construct
  REGION 1..8: note = Synthetic polypeptide representing artificial human antibody CDR-H1 region
GYTFTHYG

SEQ ID NO: 755 - protein, 8 aa, synthetic construct
  REGION 1..8: note = Synthetic polypeptide representing artificial human antibody CDR-H1 region
GFTFSNYA

SEQ ID NO: 756 - protein, 8 aa, synthetic construct
  REGION 1..8: note = Synthetic polypeptide representing artificial human antibody CDR-H1 region
GYTFSSYY

SEQ ID NO: 757 - protein, 8 aa, synthetic construct
  REGION 1..8: note = Synthetic polypeptide representing artificial human antibody CDR-H1 region
GYNFSRYW

SEQ ID NO: 758 - protein, 8 aa, synthetic construct
  REGION 1..8: note = Synthetic polypeptide representing artificial human antibody CDR-H1 region
GFTFNRYG

SEQ ID NO: 759 - protein, 8 aa, synthetic construct
  REGION 1..8: note = Synthetic polypeptide representing artificial human antibody CDR-H1 region
GYSFTSFW

SEQ ID NO: 760 - protein, 8 aa, synthetic construct
  REGION 1..8: note = Synthetic polypeptide representing artificial human antibody CDR-H1 region
GFTLDDYV

SEQ ID NO: 761 - protein, 10 aa, synthetic construct
  REGION 1..10: note = Synthetic polypeptide representing artificial human antibody CDR-H1 region
GDSISSSGFF

SEQ ID NO: 762 - protein, 8 aa, synthetic construct
  REGION 1..8: note = Synthetic polypeptide representing artificial human antibody CDR-H1 region
GGPFKTYP

SEQ ID NO: 763 - protein, 8 aa, synthetic construct
  REGION 1..8: note = Synthetic polypeptide representing artificial human antibody CDR-H1 region
GFTFGDNA

SEQ ID NO: 764 - protein, 8 aa, synthetic construct
  REGION 1..8: note = Synthetic polypeptide representing artificial human antibody CDR-H1 region
GYTFSNYG

SEQ ID NO: 765 - protein, 8 aa, synthetic construct
  REGION 1..8: note = Synthetic polypeptide representing artificial human antibody CDR-H1 region
GFDFTSYW

SEQ ID NO: 766 - protein, 8 aa, synthetic construct
  REGION 1..8: note = Synthetic polypeptide representing artificial human antibody CDR-H1 region
GFTFSSYS

SEQ ID NO: 767 - protein, 10 aa, synthetic construct
  REGION 1..10: note = Synthetic polypeptide representing artificial human antibody CDR-H1 region
GVSIGTSSYY

SEQ ID NO: 768 - protein, 8 aa, synthetic construct
  REGION 1..8: note = Synthetic polypeptide representing artificial human antibody CDR-H1 region
GDSFSDYY

SEQ ID NO: 769 - protein, 8 aa, synthetic construct
  REGION 1..8: note = Synthetic polypeptide representing artificial human antibody CDR-H1 region
GFTFSNYA

SEQ ID NO: 770 - protein, 8 aa, synthetic construct
  REGION 1..8: note = Synthetic polypeptide representing artificial human antibody CDR-H1 region
GYRFTSNG

SEQ ID NO: 771 - protein, 8 aa, synthetic construct
  REGION 1..8: note = Synthetic polypeptide representing artificial human antibody CDR-H1 region
GFTFDDYG

SEQ ID NO: 772 - protein, 8 aa, synthetic construct
  REGION 1..8: note = Synthetic polypeptide representing artificial human antibody CDR-H1 region
GFSFSAYG

SEQ ID NO: 773 - protein, 8 aa, synthetic construct
  REGION 1..8: note = Synthetic polypeptide representing artificial human antibody CDR-H1 region
EFTFSAYA

SEQ ID NO: 774 - protein, 8 aa, synthetic construct
  REGION 1..8: note = Synthetic polypeptide representing artificial human antibody CDR-H1 region
GFTFSNAW

SEQ ID NO: 775 - protein, 8 aa, synthetic construct
  REGION 1..8: note = Synthetic polypeptide representing artificial human antibody CDR-H1 region
GLTFSDYG

SEQ ID NO: 776 - protein, 8 aa, synthetic construct
  REGION 1..8: note = Synthetic polypeptide representing artificial human antibody CDR-H1 region
GYVFTSFG

SEQ ID NO: 777 - protein, 8 aa, synthetic construct
  REGION 1..8: note = Synthetic polypeptide representing artificial human antibody CDR-H1 region
GFTFEDFG

SEQ ID NO: 778 - protein, 8 aa, synthetic construct
  REGION 1..8: note = Synthetic polypeptide representing artificial human antibody CDR-H1 region
GFTLSTYG

SEQ ID NO: 779 - protein, 8 aa, synthetic construct
  REGION 1..8: note = Synthetic polypeptide representing artificial human antibody CDR-H1 region
GYTFSNYA

SEQ ID NO: 780 - protein, 8 aa, synthetic construct
  REGION 1..8: note = Synthetic polypeptide representing artificial human antibody CDR-H1 region
GYSFSTYW

SEQ ID NO: 781 - protein, 10 aa, synthetic construct
  REGION 1..10: note = Synthetic polypeptide representing artificial human antibody CDR-H1 region
GFSLTTYGVG

SEQ ID NO: 782 - protein, 8 aa, synthetic construct
  REGION 1..8: note = Synthetic polypeptide representing artificial human antibody CDR-H1 region
GFTFSAYG

SEQ ID NO: 783 - protein, 8 aa, synthetic construct
  REGION 1..8: note = Synthetic polypeptide representing artificial human antibody CDR-H1 region
GGTFSEYG

SEQ ID NO: 784 - protein, 10 aa, synthetic construct
  REGION 1..10: note = Synthetic polypeptide representing artificial human antibody CDR-H1 region
GASVNSGTHF

SEQ ID NO: 785 - protein, 8 aa, synthetic construct
  REGION 1..8: note = Synthetic polypeptide representing artificial human antibody CDR-H1 region
GFTFSSYA

SEQ ID NO: 786 - protein, 8 aa, synthetic construct
  REGION 1..8: note = Synthetic polypeptide representing artificial human antibody CDR-H1 region
GFTFSSYS

SEQ ID NO: 787 - protein, 10 aa, synthetic construct
  REGION 1..10: note = Synthetic polypeptide representing artificial human antibody CDR-H1 region
GDSISRSNYY

SEQ ID NO: 788 - protein, 8 aa, synthetic construct
  REGION 1..8: note = Synthetic polypeptide representing artificial human antibody CDR-H1 region
GFTFSKFW

SEQ ID NO: 789 - protein, 10 aa, synthetic construct
  REGION 1..10: note = Synthetic polypeptide representing artificial human antibody CDR-H1 region
GFSLTTTGVG

SEQ ID NO: 790 - protein, 8 aa, synthetic construct
  REGION 1..8: note = Synthetic polypeptide representing artificial human antibody CDR-H1 region
GFIFSSYG

SEQ ID NO: 791 - protein, 8 aa, synthetic construct
  REGION 1..8: note = Synthetic polypeptide representing artificial human antibody CDR-H1 region
GFTFSSYE

SEQ ID NO: 792 - protein, 8 aa, synthetic construct
  REGION 1..8: note = Synthetic polypeptide representing artificial human antibody CDR-H1 region
GFTFSSYS

SEQ ID NO: 793 - protein, 10 aa, synthetic construct
  REGION 1..10: note = Synthetic polypeptide representing artificial human antibody CDR-H1 region
GFSLSTSGMC

SEQ ID NO: 794 - protein, 8 aa, synthetic construct
  REGION 1..8: note = Synthetic polypeptide representing artificial human antibody CDR-H1 region
GFTFSSYW

SEQ ID NO: 795 - protein, 8 aa, synthetic construct
  REGION 1..8: note = Synthetic polypeptide representing artificial human antibody CDR-H1 region
GFTFASYG

SEQ ID NO: 796 - protein, 8 aa, synthetic construct
  REGION 1..8: note = Synthetic polypeptide representing artificial human antibody CDR-H1 region
GFTFSSYS

SEQ ID NO: 797 - protein, 8 aa, synthetic construct
  REGION 1..8: note = Synthetic polypeptide representing artificial human antibody CDR-H1 region
GYIFTGSF

SEQ ID NO: 798 - protein, 10 aa, synthetic construct
  REGION 1..10: note = Synthetic polypeptide representing artificial human antibody CDR-H1 region
GGSISSGTYY

SEQ ID NO: 799 - protein, 8 aa, synthetic construct
  REGION 1..8: note = Synthetic polypeptide representing artificial human antibody CDR-H1 region
GYSFTNYW

SEQ ID NO: 800 - protein, 8 aa, synthetic construct
  REGION 1..8: note = Synthetic polypeptide representing artificial human antibody CDR-H1 region
GFTFSNAW

SEQ ID NO: 801 - protein, 8 aa, synthetic construct
  REGION 1..8: note = Synthetic polypeptide representing artificial human antibody CDR-H1 region
GFPFSTYA

SEQ ID NO: 802 - protein, 8 aa, synthetic construct
  REGION 1..8: note = Synthetic polypeptide representing artificial human antibody CDR-H1 region
GFSFSGSS

SEQ ID NO: 803 - protein, 8 aa, synthetic construct
  REGION 1..8: note = Synthetic polypeptide representing artificial human antibody CDR-H1 region
GGSISSYY

SEQ ID NO: 804 - protein, 8 aa, synthetic construct
  REGION 1..8: note = Synthetic polypeptide representing artificial human antibody CDR-H1 region
GFTFGDYA

SEQ ID NO: 805 - protein, 8 aa, synthetic construct
  REGION 1..8: note = Synthetic polypeptide representing artificial human antibody CDR-H1 region
GFTLSNYG

SEQ ID NO: 806 - protein, 8 aa, synthetic construct
  REGION 1..8: note = Synthetic polypeptide representing artificial human antibody CDR-H1 region
GFSITTHS

SEQ ID NO: 807 - protein, 8 aa, synthetic construct
  REGION 1..8: note = Synthetic polypeptide representing artificial human antibody CDR-H1 region
GFTFSSYE

SEQ ID NO: 808 - protein, 8 aa, synthetic construct
  REGION 1..8: note = Synthetic polypeptide representing artificial human antibody CDR-H1 region
GFTFSSYS

SEQ ID NO: 809 - protein, 8 aa, synthetic construct
  REGION 1..8: note = Synthetic polypeptide representing artificial human antibody CDR-H1 region
GFSVSSKY

SEQ ID NO: 810 - protein, 8 aa, synthetic construct
  REGION 1..8: note = Synthetic polypeptide representing artificial human antibody CDR-H1 region
GYSFTNYW

SEQ ID NO: 811 - protein, 8 aa, synthetic construct
  REGION 1..8: note = Synthetic polypeptide representing artificial human antibody CDR-H1 region
GFTFSGSA

SEQ ID NO: 812 - protein, 8 aa, synthetic construct
  REGION 1..8: note = Synthetic polypeptide representing artificial human antibody CDR-H1 region
GFTFSDYG

SEQ ID NO: 813 - protein, 8 aa, synthetic construct
  REGION 1..8: note = Synthetic polypeptide representing artificial human antibody CDR-H1 region
GYTFNNYG

SEQ ID NO: 814 - protein, 6 aa, synthetic construct
  REGION 1..6: note = Synthetic polypeptide representing artificial human antibody CDR-L1 region
QGVSSY

SEQ ID NO: 815 - protein, 6 aa, synthetic construct
  REGION 1..6: note = Synthetic polypeptide representing artificial human antibody CDR-L1 region
QSIGSY

SEQ ID NO: 816 - protein, 6 aa, synthetic construct
  REGION 1..6: note = Synthetic polypeptide representing artificial human antibody CDR-L1 region
QGIDVW

SEQ ID NO: 817 - protein, 8 aa, synthetic construct
  REGION 1..8: note = Synthetic polypeptide representing artificial human antibody CDR-L1 region
SSNIGSNY

SEQ ID NO: 818 - protein, 6 aa, synthetic construct
  REGION 1..6: note = Synthetic polypeptide representing artificial human antibody CDR-L1 region
SLRNYY

SEQ ID NO: 819 - protein, 6 aa, synthetic construct
  REGION 1..6: note = Synthetic polypeptide representing artificial human antibody CDR-L1 region
NIGIKS

SEQ ID NO: 820 - protein, 6 aa, synthetic construct
  REGION 1..6: note = Synthetic polypeptide representing artificial human antibody CDR-L1 region
QSISSY

SEQ ID NO: 821 - protein, 7 aa, synthetic construct
  REGION 1..7: note = Synthetic polypeptide representing artificial human antibody CDR-L1 region
QSVSSSY

SEQ ID NO: 822 - protein, 8 aa, synthetic construct
  REGION 1..8: note = Synthetic polypeptide representing artificial human antibody CDR-L1 region
SGNIASYY

SEQ ID NO: 823 - protein, 7 aa, synthetic construct
  REGION 1..7: note = Synthetic polypeptide representing artificial human antibody CDR-L1 region
QSVSSSY

SEQ ID NO: 824 - protein, 8 aa, synthetic construct
  REGION 1..8: note = Synthetic polypeptide representing artificial human antibody CDR-L1 region
SSNIENND

SEQ ID NO: 825 - protein, 11 aa, synthetic construct
  REGION 1..11: note = Synthetic polypeptide representing artificial human antibody CDR-L1 region
QSLVHSDGNTY

SEQ ID NO: 826 - protein, 8 aa, synthetic construct
  REGION 1..8: note = Synthetic polypeptide representing artificial human antibody CDR-L1 region
SSNIGRNY

SEQ ID NO: 827 - protein, 8 aa, synthetic construct
  REGION 1..8: note = Synthetic polypeptide representing artificial human antibody CDR-L1 region
ISNIGSNP

SEQ ID NO: 828 - protein, 6 aa, synthetic construct
  REGION 1..6: note = Synthetic polypeptide representing artificial human antibody CDR-L1 region
QNVNFN

SEQ ID NO: 829 - protein, 7 aa, synthetic construct
  REGION 1..7: note = Synthetic polypeptide representing artificial human antibody CDR-L1 region
QSVSSSS

SEQ ID NO: 830 - protein, 6 aa, synthetic construct
  REGION 1..6: note = Synthetic polypeptide representing artificial human antibody CDR-L1 region
ALPKQY

SEQ ID NO: 831 - protein, 6 aa, synthetic construct
  REGION 1..6: note = Synthetic polypeptide representing artificial human antibody CDR-L1 region
QSVSSY

SEQ ID NO: 832 - protein, 6 aa, synthetic construct
  REGION 1..6: note = Synthetic polypeptide representing artificial human antibody CDR-L1 region
QSVGSY

SEQ ID NO: 833 - protein, 6 aa, synthetic construct
  REGION 1..6: note = Synthetic polypeptide representing artificial human antibody CDR-L1 region
QAIANS

SEQ ID NO: 834 - protein, 12 aa, synthetic construct
  REGION 1..12: note = Synthetic polypeptide representing artificial human antibody CDR-L1 region
QSVLYSSNNENY

SEQ ID NO: 835 - protein, 6 aa, synthetic construct
  REGION 1..6: note = Synthetic polypeptide representing artificial human antibody CDR-L1 region
HNINTY

SEQ ID NO: 836 - protein, 9 aa, synthetic construct
  REGION 1..9: note = Synthetic polypeptide representing artificial human antibody CDR-L1 region
SSDVGGYNY

SEQ ID NO: 837 - protein, 8 aa, synthetic construct
  REGION 1..8: note = Synthetic polypeptide representing artificial human antibody CDR-L1 region
SANIGKNY

SEQ ID NO: 838 - protein, 6 aa, synthetic construct
  REGION 1..6: note = Synthetic polypeptide representing artificial human antibody CDR-L1 region
QSISTY

SEQ ID NO: 839 - protein, 6 aa, synthetic construct
  REGION 1..6: note = Synthetic polypeptide representing artificial human antibody CDR-L1 region
QSIKNY

SEQ ID NO: 840 - protein, 9 aa, synthetic construct
  REGION 1..9: note = Synthetic polypeptide representing artificial human antibody CDR-L1 region
SSNIGAGYD

SEQ ID NO: 841 - protein, 6 aa, synthetic construct
  REGION 1..6: note = Synthetic polypeptide representing artificial human antibody CDR-L1 region
NIGSKT

SEQ ID NO: 842 - protein, 6 aa, synthetic construct
  REGION 1..6: note = Synthetic polypeptide representing artificial human antibody CDR-L1 region
QDISNW

SEQ ID NO: 843 - protein, 6 aa, synthetic construct
  REGION 1..6: note = Synthetic polypeptide representing artificial human antibody CDR-L1 region
ALPNEN

SEQ ID NO: 844 - protein, 9 aa, synthetic construct
  REGION 1..9: note = Synthetic polypeptide representing artificial human antibody CDR-L1 region
TSDIGSYDR

SEQ ID NO: 845 - protein, 8 aa, synthetic construct
  REGION 1..8: note = Synthetic polypeptide representing artificial human antibody CDR-L1 region
SSNIGNNY

SEQ ID NO: 846 - protein, 11 aa, synthetic construct
  REGION 1..11: note = Synthetic polypeptide representing artificial human antibody CDR-L1 region
QSLVYSDGNTY

SEQ ID NO: 847 - protein, 7 aa, synthetic construct
  REGION 1..7: note = Synthetic polypeptide representing artificial human antibody CDR-L1 region
QSIRSSY

SEQ ID NO: 848 - protein, 9 aa, synthetic construct
  REGION 1..9: note = Synthetic polypeptide representing artificial human antibody CDR-L1 region
TSNIGAGYD

SEQ ID NO: 849 - protein, 6 aa, synthetic construct
  REGION 1..6: note = Synthetic polypeptide representing artificial human antibody CDR-L1 region
QSISSY

SEQ ID NO: 850 - protein, 12 aa, synthetic construct
  REGION 1..12: note = Synthetic polypeptide representing artificial human antibody CDR-L1 region
QNVLYSSNNKNY

SEQ ID NO: 851 - protein, 9 aa, synthetic construct
  REGION 1..9: note = Synthetic polypeptide representing artificial human antibody CDR-L1 region
SSNIGAGYD

SEQ ID NO: 852 - protein, 8 aa, synthetic construct
  REGION 1..8: note = Synthetic polypeptide representing artificial human antibody CDR-L1 region
SGSIASSY

SEQ ID NO: 853 - protein, 6 aa, synthetic construct
  REGION 1..6: note = Synthetic polypeptide representing artificial human antibody CDR-L1 region
QSISSY

SEQ ID NO: 854 - protein, 6 aa, synthetic construct
  REGION 1..6: note = Synthetic polypeptide representing artificial human antibody CDR-L1 region
NIGSKS

SEQ ID NO: 855 - protein, 9 aa, synthetic construct
  REGION 1..9: note = Synthetic polypeptide representing artificial human antibody CDR-L1 region
SSDVGGYNY

SEQ ID NO: 856 - protein, 6 aa, synthetic construct
  REGION 1..6: note = Synthetic polypeptide representing artificial human antibody CDR-L1 region
QSISSY

SEQ ID NO: 857 - protein, 6 aa, synthetic construct
  REGION 1..6: note = Synthetic polypeptide representing artificial human antibody CDR-L1 region
QGINSA

SEQ ID NO: 858 - protein, 6 aa, synthetic construct
  REGION 1..6: note = Synthetic polypeptide representing artificial human antibody CDR-L1 region
SLRRYY

SEQ ID NO: 859 - protein, 6 aa, synthetic construct
  REGION 1..6: note = Synthetic polypeptide representing artificial human antibody CDR-L1 region
QGIRNW

SEQ ID NO: 860 - protein, 6 aa, synthetic construct
  REGION 1..6: note = Synthetic polypeptide representing artificial human antibody CDR-L1 region
QSVGTY

SEQ ID NO: 861 - protein, 7 aa, synthetic construct
  REGION 1..7: note = Synthetic polypeptide representing artificial human antibody CDR-L1 region
QSVSSNY

SEQ ID NO: 862 - protein, 7 aa, synthetic construct
  REGION 1..7: note = Synthetic polypeptide representing artificial human antibody CDR-L1 region
QSVSSRY

SEQ ID NO: 863 - protein, 6 aa, synthetic construct
  REGION 1..6: note = Synthetic polypeptide representing artificial human antibody CDR-L1 region
QSVGSS

SEQ ID NO: 864 - protein, 6 aa, synthetic construct
  REGION 1..6: note = Synthetic polypeptide representing artificial human antibody CDR-L1 region
QSISSW

SEQ ID NO: 865 - protein, 6 aa, synthetic construct
  REGION 1..6: note = Synthetic polypeptide representing artificial human antibody CDR-L1 region
NIGSKS

SEQ ID NO: 866 - protein, 6 aa, synthetic construct
  REGION 1..6: note = Synthetic polypeptide representing artificial human antibody CDR-L1 region
QSVSTY

SEQ ID NO: 867 - protein, 11 aa, synthetic construct
  REGION 1..11: note = Synthetic polypeptide representing artificial human antibody CDR-L1 region
QSLLHSNGYNY

SEQ ID NO: 868 - protein, 6 aa, synthetic construct
  REGION 1..6: note = Synthetic polypeptide representing artificial human antibody CDR-L1 region
QSISSW

SEQ ID NO: 869 - protein, 9 aa, synthetic construct
  REGION 1..9: note = Synthetic polypeptide representing artificial human antibody CDR-L1 region
SGSVSTGNY

SEQ ID NO: 870 - protein, 7 aa, synthetic construct
  REGION 1..7: note = Synthetic polypeptide representing artificial human antibody CDR-L1 region
QSVSSSY

SEQ ID NO: 871 - protein, 6 aa, synthetic construct
  REGION 1..6: note = Synthetic polypeptide representing artificial human antibody CDR-L1 region
NIGSKS

SEQ ID NO: 872 - protein, 6 aa, synthetic construct
  REGION 1..6: note = Synthetic polypeptide representing artificial human antibody CDR-L1 region
QSISRW

SEQ ID NO: 873 - protein, 6 aa, synthetic construct
  REGION 1..6: note = Synthetic polypeptide representing artificial human antibody CDR-L1 region
QDIDDD

SEQ ID NO: 874 - protein, 7 aa, synthetic construct
  REGION 1..7: note = Synthetic polypeptide representing artificial human antibody CDR-L1 region
QSIGAAY

SEQ ID NO: 875 - protein, 6 aa, synthetic construct
  REGION 1..6: note = Synthetic polypeptide representing artificial human antibody CDR-L1 region
ALPKKY

SEQ ID NO: 876 - protein, 11 aa, synthetic construct
  REGION 1..11: note = Synthetic polypeptide representing artificial human antibody CDR-L1 region
QSLLHSDGYNY

SEQ ID NO: 877 - protein, 9 aa, synthetic construct
  REGION 1..9: note = Synthetic polypeptide representing artificial human antibody CDR-L1 region
SSDVGGYNY

SEQ ID NO: 878 - protein, 6 aa, synthetic construct
  REGION 1..6: note = Synthetic polypeptide representing artificial human antibody CDR-L1 region
QSISSN

SEQ ID NO: 879 - protein, 9 aa, synthetic construct
  REGION 1..9: note = Synthetic polypeptide representing artificial human antibody CDR-L1 region
SSDVGGYNY

SEQ ID NO: 880 - protein, 11 aa, synthetic construct
  REGION 1..11: note = Synthetic polypeptide representing artificial human antibody CDR-L1 region
QRLLHSDGKTY

SEQ ID NO: 881 - protein, 7 aa, synthetic construct
  REGION 1..7: note = Synthetic polypeptide representing artificial human antibody CDR-L1 region
QSVSSSF

SEQ ID NO: 882 - protein, 6 aa, synthetic construct
  REGION 1..6: note = Synthetic polypeptide representing artificial human antibody CDR-L1 region
QDVDTY

SEQ ID NO: 883 - protein, 8 aa, synthetic construct
  REGION 1..8: note = Synthetic polypeptide representing artificial human antibody CDR-L1 region
SSNIGKYS

SEQ ID NO: 884 - protein, 6 aa, synthetic construct
  REGION 1..6: note = Synthetic polypeptide representing artificial human antibody CDR-L1 region
QSVGSS

SEQ ID NO: 885 - protein, 7 aa, synthetic construct
  REGION 1..7: note = Synthetic polypeptide representing artificial human antibody CDR-L1 region
QSVSSSY

SEQ ID NO: 886 - protein, 6 aa, synthetic construct
  REGION 1..6: note = Synthetic polypeptide representing artificial human antibody CDR-L1 region
QSISVW

SEQ ID NO: 887 - protein, 6 aa, synthetic construct
  REGION 1..6: note = Synthetic polypeptide representing artificial human antibody CDR-L1 region
SLRRYY

SEQ ID NO: 888 - protein, 6 aa, synthetic construct
  REGION 1..6: note = Synthetic polypeptide representing artificial human antibody CDR-L1 region
QSISSY

SEQ ID NO: 889 - protein, 7 aa, synthetic construct
  REGION 1..7: note = Synthetic polypeptide representing artificial human antibody CDR-L1 region
QSVSSSY

SEQ ID NO: 890 - protein, 8 aa, synthetic construct
  REGION 1..8: note = Synthetic polypeptide representing artificial human antibody CDR-L1 region
SSNIDNNY

SEQ ID NO: 891 - protein, 6 aa, synthetic construct
  REGION 1..6: note = Synthetic polypeptide representing artificial human antibody CDR-L1 region
QTISTY

SEQ ID NO: 892 - protein, 12 aa, synthetic construct
  REGION 1..12: note = Synthetic polypeptide representing artificial human antibody CDR-L1 region
QTVLHSSNNRNY

SEQ ID NO: 893 - protein, 6 aa, synthetic construct
  REGION 1..6: note = Synthetic polypeptide representing artificial human antibody CDR-L1 region
QSVDGN

SEQ ID NO: 894 - protein, 6 aa, synthetic construct
  REGION 1..6: note = Synthetic polypeptide representing artificial human antibody CDR-L1 region
QSISNY

SEQ ID NO: 895 - protein, 9 aa, synthetic construct
  REGION 1..9: note = Synthetic polypeptide representing artificial human antibody CDR-L1 region
SSNIGAGYD

SEQ ID NO: 896 - protein, 6 aa, synthetic construct
  REGION 1..6: note = Synthetic polypeptide representing artificial human antibody CDR-L1 region
QSVSTN

SEQ ID NO: 897 - protein, 6 aa, synthetic construct
  REGION 1..6: note = Synthetic polypeptide representing artificial human antibody CDR-L1 region
QSVSGY

SEQ ID NO: 898 - protein, 8 aa, synthetic construct
  REGION 1..8: note = Synthetic polypeptide representing artificial human antibody CDR-L1 region
RSNVASHA

SEQ ID NO: 899 - protein, 12 aa, synthetic construct
  REGION 1..12: note = Synthetic polypeptide representing artificial human antibody CDR-L1 region
QSLLDSDDGKTY

SEQ ID NO: 900 - protein, 6 aa, synthetic construct
  REGION 1..6: note = Synthetic polypeptide representing artificial human antibody CDR-L1 region
KLGDKY

SEQ ID NO: 901 - protein, 6 aa, synthetic construct
  REGION 1..6: note = Synthetic polypeptide representing artificial human antibody CDR-L1 region
KLGDIC

SEQ ID NO: 902 - protein, 12 aa, synthetic construct
  REGION 1..12: note = Synthetic polypeptide representing artificial human antibody CDR-L1 region
QSLFYSSNNKNY

SEQ ID NO: 903 - protein, 6 aa, synthetic construct
  REGION 1..6: note = Synthetic polypeptide representing artificial human antibody CDR-L1 region
QSVSSY

SEQ ID NO: 904 - protein, 6 aa, synthetic construct
  REGION 1..6: note = Synthetic polypeptide representing artificial human antibody CDR-L1 region
QSVSNY

SEQ ID NO: 905 - protein, 11 aa, synthetic construct
  REGION 1..11: note = Synthetic polypeptide representing artificial human antibody CDR-L1 region
QSLLQSNGNNY

SEQ ID NO: 906 - protein, 6 aa, synthetic construct
  REGION 1..6: note = Synthetic polypeptide representing artificial human antibody CDR-L1 region
QSISGW

SEQ ID NO: 907 - protein, 8 aa, synthetic construct
  REGION 1..8: note = Synthetic polypeptide representing artificial human antibody CDR-L1 region
SSNIGNNY

SEQ ID NO: 908 - protein, 6 aa, synthetic construct
  REGION 1..6: note = Synthetic polypeptide representing artificial human antibody CDR-L1 region
QSVSNY

SEQ ID NO: 909 - protein, 11 aa, synthetic construct
  REGION 1..11: note = Synthetic polypeptide representing artificial human antibody CDR-L1 region
QSLLRRDGNNY

SEQ ID NO: 910 - protein, 9 aa, synthetic construct
  REGION 1..9: note = Synthetic polypeptide representing artificial human antibody CDR-L1 region
SSDVGGFNY

SEQ ID NO: 911 - protein, 11 aa, synthetic construct
  REGION 1..11: note = Synthetic polypeptide representing artificial human antibody CDR-L1 region
QSLVYSDGNTY

SEQ ID NO: 912 - protein, 6 aa, synthetic construct
  REGION 1..6: note = Synthetic polypeptide representing artificial human antibody CDR-L1 region
QSISSY

SEQ ID NO: 913 - protein, 6 aa, synthetic construct
  REGION 1..6: note = Synthetic polypeptide representing artificial human antibody CDR-L1 region
QDISNY

SEQ ID NO: 914 - protein, 6 aa, synthetic construct
  REGION 1..6: note = Synthetic polypeptide representing artificial human antibody CDR-L1 region
NIGSKS

SEQ ID NO: 915 - protein, 6 aa, synthetic construct
  REGION 1..6: note = Synthetic polypeptide representing artificial human antibody CDR-L1 region
QVISDY

SEQ ID NO: 916 - protein, 6 aa, synthetic construct
  REGION 1..6: note = Synthetic polypeptide representing artificial human antibody CDR-L1 region
QSISTY

SEQ ID NO: 917 - protein, 6 aa, synthetic construct
  REGION 1..6: note = Synthetic polypeptide representing artificial human antibody CDR-L1 region
QRISNW

SEQ ID NO: 918 - protein, 11 aa, synthetic construct
  REGION 1..11: note = Synthetic polypeptide representing artificial human antibody CDR-L1 region
QSLLNPDGKTY

SEQ ID NO: 919 - protein, 6 aa, synthetic construct
  REGION 1..6: note = Synthetic polypeptide representing artificial human antibody CDR-L1 region
QSISGY

SEQ ID NO: 920 - protein, 9 aa, synthetic construct
  REGION 1..9: note = Synthetic polypeptide representing artificial human antibody CDR-L1 region
SSNVGADYD

SEQ ID NO: 921 - protein, 6 aa, synthetic construct
  REGION 1..6: note = Synthetic polypeptide representing artificial human antibody CDR-L1 region
QSVSSS

SEQ ID NO: 922 - protein, 7 aa, synthetic construct
  REGION 1..7: note = Synthetic polypeptide representing artificial human antibody CDR-L1 region
QSFDGKS

SEQ ID NO: 923 - protein, 12 aa, synthetic construct
  REGION 1..12: note = Synthetic polypeptide representing artificial human antibody CDR-L1 region
QSILYSSNNKDS

SEQ ID NO: 924 - protein, 7 aa, synthetic construct
  REGION 1..7: note = Synthetic polypeptide representing artificial human antibody CDR-L1 region
QSVSGSH

SEQ ID NO: 925 - protein, 9 aa, synthetic construct
  REGION 1..9: note = Synthetic polypeptide representing artificial human antibody CDR-L1 region
SSDVGGYNY

SEQ ID NO: 926 - protein, 6 aa, synthetic construct
  REGION 1..6: note = Synthetic polypeptide representing artificial human antibody CDR-L1 region
ALPKKY

SEQ ID NO: 927 - protein, 6 aa, synthetic construct
  REGION 1..6: note = Synthetic polypeptide representing artificial human antibody CDR-L1 region
QSVSSN

SEQ ID NO: 928 - protein, 7 aa, synthetic construct
  REGION 1..7: note = Synthetic polypeptide representing artificial human antibody CDR-L1 region
QSVSSSY

SEQ ID NO: 929 - protein, 9 aa, synthetic construct
  REGION 1..9: note = Synthetic polypeptide representing artificial human antibody CDR-L1 region
SSDVGLYNF

SEQ ID NO: 930 - protein, 9 aa, synthetic construct
  REGION 1..9: note = Synthetic polypeptide representing artificial human antibody CDR-L1 region
NSNIGAGYY

SEQ ID NO: 931 - protein, 7 aa, synthetic construct
  REGION 1..7: note = Synthetic polypeptide representing artificial human antibody CDR-L1 region
QSVTSSY

SEQ ID NO: 932 - protein, 8 aa, synthetic construct
  REGION 1..8: note = Synthetic polypeptide representing artificial human antibody CDR-L1 region
SSNIGDNF

SEQ ID NO: 933 - protein, 6 aa, synthetic construct
  REGION 1..6: note = Synthetic polypeptide representing artificial human antibody CDR-L1 region
QDIDDD

SEQ ID NO: 934 - protein, 6 aa, synthetic construct
  REGION 1..6: note = Synthetic polypeptide representing artificial human antibody CDR-L1 region
QSVGSW

SEQ ID NO: 935 - protein, 6 aa, synthetic construct
  REGION 1..6: note = Synthetic polypeptide representing artificial human antibody CDR-L1 region
QDISSF

SEQ ID NO: 936 - protein, 6 aa, synthetic construct
  REGION 1..6: note = Synthetic polypeptide representing artificial human antibody CDR-L1 region
SLRDYS

SEQ ID NO: 937 - protein, 6 aa, synthetic construct
  REGION 1..6: note = Synthetic polypeptide representing artificial human antibody CDR-L1 region
QSVSAY

SEQ ID NO: 938 - protein, 6 aa, synthetic construct
  REGION 1..6: note = Synthetic polypeptide representing artificial human antibody CDR-L1 region
NIGSKS

SEQ ID NO: 939 - protein, 9 aa, synthetic construct
  REGION 1..9: note = Synthetic polypeptide representing artificial human antibody CDR-L1 region
SSDVGNYNL

SEQ ID NO: 940 - protein, 6 aa, synthetic construct
  REGION 1..6: note = Synthetic polypeptide representing artificial human antibody CDR-L1 region
QSVRSH

SEQ ID NO: 941 - protein, 6 aa, synthetic construct
  REGION 1..6: note = Synthetic polypeptide representing artificial human antibody CDR-L1 region
SLRSYY

SEQ ID NO: 942 - protein, 7 aa, synthetic construct
  REGION 1..7: note = Synthetic polypeptide representing artificial human antibody CDR-L1 region
QAIVSNY

SEQ ID NO: 943 - protein, 6 aa, synthetic construct
  REGION 1..6: note = Synthetic polypeptide representing artificial human antibody CDR-L1 region
NIGKKD

SEQ ID NO: 944 - protein, 6 aa, synthetic construct
  REGION 1..6: note = Synthetic polypeptide representing artificial human antibody CDR-L1 region
NIGSKS

SEQ ID NO: 945 - protein, 6 aa, synthetic construct
  REGION 1..6: note = Synthetic polypeptide representing artificial human antibody CDR-L1 region
ALPKQS

SEQ ID NO: 946 - protein, 6 aa, synthetic construct
  REGION 1..6: note = Synthetic polypeptide representing artificial human antibody CDR-L1 region
ALPKQY

SEQ ID NO: 947 - protein, 6 aa, synthetic construct
  REGION 1..6: note = Synthetic polypeptide representing artificial human antibody CDR-L1 region
ALPKKY

SEQ ID NO: 948 - protein, 6 aa, synthetic construct
  REGION 1..6: note = Synthetic polypeptide representing artificial human antibody CDR-L1 region
QTIDTY

SEQ ID NO: 949 - protein, 6 aa, synthetic construct
  REGION 1..6: note = Synthetic polypeptide representing artificial human antibody CDR-L1 region
QGITNY

SEQ ID NO: 950 - protein, 6 aa, synthetic construct
  REGION 1..6: note = Synthetic polypeptide representing artificial human antibody CDR-L1 region
QDISTF

SEQ ID NO: 951 - protein, 9 aa, synthetic construct
  REGION 1..9: note = Synthetic polypeptide representing artificial human antibody CDR-L1 region
SSDIGGYNY

SEQ ID NO: 952 - protein, 6 aa, synthetic construct
  REGION 1..6: note = Synthetic polypeptide representing artificial human antibody CDR-L1 region
KLGDKY

SEQ ID NO: 953 - protein, 8 aa, synthetic construct
  REGION 1..8: note = Synthetic polypeptide representing artificial human antibody CDR-L1 region
TSNIGNNF

SEQ ID NO: 954 - protein, 7 aa, synthetic construct
  REGION 1..7: note = Synthetic polypeptide representing artificial human antibody CDR-L1 region
QSISSTY

SEQ ID NO: 955 - protein, 7 aa, synthetic construct
  REGION 1..7: note = Synthetic polypeptide representing artificial human antibody CDR-L1 region
QSVSSSY

SEQ ID NO: 956 - protein, 9 aa, synthetic construct
  REGION 1..9: note = Synthetic polypeptide representing artificial human antibody CDR-L1 region
SSDVGDYNY

SEQ ID NO: 957 - protein, 6 aa, synthetic construct
  REGION 1..6: note = Synthetic polypeptide representing artificial human antibody CDR-L1 region
QFISVY

SEQ ID NO: 958 - protein, 6 aa, synthetic construct
  REGION 1..6: note = Synthetic polypeptide representing artificial human antibody CDR-L1 region
QSVSSK

SEQ ID NO: 959 - protein, 6 aa, synthetic construct
  REGION 1..6: note = Synthetic polypeptide representing artificial human antibody CDR-L1 region
VLAKNY

SEQ ID NO: 960 - protein, 9 aa, synthetic construct
  REGION 1..9: note = Synthetic polypeptide representing artificial human antibody CDR-L1 region
SSDVGAYPY

SEQ ID NO: 961 - protein, 7 aa, synthetic construct
  REGION 1..7: note = Synthetic polypeptide representing artificial human antibody CDR-L1 region
QSLSSGY

SEQ ID NO: 962 - protein, 12 aa, synthetic construct
  REGION 1..12: note = Synthetic polypeptide representing artificial human antibody CDR-L1 region
QSLLYRSNDKNY

SEQ ID NO: 963 - protein, 9 aa, synthetic construct
  REGION 1..9: note = Synthetic polypeptide representing artificial human antibody CDR-L1 region
GSNIGAGYD

SEQ ID NO: 964 - protein, 9 aa, synthetic construct
  REGION 1..9: note = Synthetic polypeptide representing artificial human antibody CDR-L1 region
SSDVGGYDH

SEQ ID NO: 965 - protein, 6 aa, synthetic construct
  REGION 1..6: note = Synthetic polypeptide representing artificial human antibody CDR-L1 region
QSISSW

SEQ ID NO: 966 - protein, 6 aa, synthetic construct
  REGION 1..6: note = Synthetic polypeptide representing artificial human antibody CDR-L1 region
QSIVTN

SEQ ID NO: 967 - protein, 7 aa, synthetic construct
  REGION 1..7: note = Synthetic polypeptide representing artificial human antibody CDR-L1 region
SGHSTYA

SEQ ID NO: 968 - protein, 7 aa, synthetic construct
  REGION 1..7: note = Synthetic polypeptide representing artificial human antibody CDR-L1 region
QSVSSSY

SEQ ID NO: 969 - protein, 9 aa, synthetic construct
  REGION 1..9: note = Synthetic polypeptide representing artificial human antibody CDR-L1 region
SSNLGAGYA

SEQ ID NO: 970 - protein, 9 aa, synthetic construct
  REGION 1..9: note = Synthetic polypeptide representing artificial human antibody CDR-L1 region
STNIGTIYD

SEQ ID NO: 971 - protein, 11 aa, synthetic construct
  REGION 1..11: note = Synthetic polypeptide representing artificial human antibody CDR-L1 region
QSLLSSNGHHL

SEQ ID NO: 972 - protein, 6 aa, synthetic construct
  REGION 1..6: note = Synthetic polypeptide representing artificial human antibody CDR-L1 region
QGISSY

SEQ ID NO: 973 - protein, 8 aa, synthetic construct
  REGION 1..8: note = Synthetic polypeptide representing artificial human antibody CDR-L1 region
NSNIGSTF

SEQ ID NO: 974 - protein, 11 aa, synthetic construct
  REGION 1..11: note = Synthetic polypeptide representing artificial human antibody CDR-L1 region
QSLLHSNGVYY

SEQ ID NO: 975 - protein, 6 aa, synthetic construct
  REGION 1..6: note = Synthetic polypeptide representing artificial human antibody CDR-L1 region
SLRSYF

SEQ ID NO: 976 - protein, 6 aa, synthetic construct
  REGION 1..6: note = Synthetic polypeptide representing artificial human antibody CDR-L1 region
QSISSW

SEQ ID NO: 977 - protein, 12 aa, synthetic construct
  REGION 1..12: note = Synthetic polypeptide representing artificial human antibody CDR-L1 region
QTVLYDSNNKNY

SEQ ID NO: 978 - protein, 8 aa, synthetic construct
  REGION 1..8: note = Synthetic polypeptide representing artificial human antibody CDR-L1 region
SSNIGGKY

SEQ ID NO: 979 - protein, 6 aa, synthetic construct
  REGION 1..6: note = Synthetic polypeptide representing artificial human antibody CDR-L1 region
QSISDW

SEQ ID NO: 980 - protein, 6 aa, synthetic construct
  REGION 1..6: note = Synthetic polypeptide representing artificial human antibody CDR-L1 region
NPGIKS

SEQ ID NO: 981 - protein, 9 aa, synthetic construct
  REGION 1..9: note = Synthetic polypeptide representing artificial human antibody CDR-L1 region
TSNIGADYD

SEQ ID NO: 982 - protein, 6 aa, synthetic construct
  REGION 1..6: note = Synthetic polypeptide representing artificial human antibody CDR-L1 region
SLRSFY

SEQ ID NO: 983 - protein, 9 aa, synthetic construct
  REGION 1..9: note = Synthetic polypeptide representing artificial human antibody CDR-L1 region
SSDVDGYNY

SEQ ID NO: 984 - protein, 12 aa, synthetic construct
  REGION 1..12: note = Synthetic polypeptide representing artificial human antibody CDR-L1 region
QSVLYSSDNKNY

SEQ ID NO: 985 - protein, 9 aa, synthetic construct
  REGION 1..9: note = Synthetic polypeptide representing artificial human antibody CDR-L1 region
SSDVGGYNY

SEQ ID NO: 986 - protein, 6 aa, synthetic construct
  REGION 1..6: note = Synthetic polypeptide representing artificial human antibody CDR-L1 region
QDISNY

SEQ ID NO: 987 - protein, 6 aa, synthetic construct
  REGION 1..6: note = Synthetic polypeptide representing artificial human antibody CDR-L1 region
NIGSKS

SEQ ID NO: 988 - protein, 7 aa, synthetic construct
  REGION 1..7: note = Synthetic polypeptide representing artificial human antibody CDR-L1 region
QSVRGNY

SEQ ID NO: 989 - protein, 8 aa, synthetic construct
  REGION 1..8: note = Synthetic polypeptide representing artificial human antibody CDR-L1 region
SSNIGSNY

SEQ ID NO: 990 - protein, 6 aa, synthetic construct
  REGION 1..6: note = Synthetic polypeptide representing artificial human antibody CDR-L1 region
NIGSYN

SEQ ID NO: 991 - protein, 7 aa, synthetic construct
  REGION 1..7: note = Synthetic polypeptide representing artificial human antibody CDR-L1 region
QRVSSNY

SEQ ID NO: 992 - protein, 9 aa, synthetic construct
  REGION 1..9: note = Synthetic polypeptide representing artificial human antibody CDR-L1 region
SSDVGSYNL

SEQ ID NO: 993 - protein, 11 aa, synthetic construct
  REGION 1..11: note = Synthetic polypeptide representing artificial human antibody CDR-L1 region
QSLVYSDGNTY

SEQ ID NO: 994 - protein, 8 aa, synthetic construct
  REGION 1..8: note = Synthetic polypeptide representing artificial human antibody CDR-L1 region
SSNIGSNY

SEQ ID NO: 995 - protein, 6 aa, synthetic construct
  REGION 1..6: note = Synthetic polypeptide representing artificial human antibody CDR-L1 region
SLRSYY

SEQ ID NO: 996 - protein, 6 aa, synthetic construct
  REGION 1..6: note = Synthetic polypeptide representing artificial human antibody CDR-L1 region
QSISSY

SEQ ID NO: 997 - protein, 6 aa, synthetic construct
  REGION 1..6: note = Synthetic polypeptide representing artificial human antibody CDR-L1 region
NIGYRN

SEQ ID NO: 998 - protein, 6 aa, synthetic construct
  REGION 1..6: note = Synthetic polypeptide representing artificial human antibody CDR-L1 region
QGIRND

SEQ ID NO: 999 - protein, 6 aa, synthetic construct
  REGION 1..6: note = Synthetic polypeptide representing artificial human antibody CDR-L1 region
QSISSW

SEQ ID NO: 1000 - protein, 11 aa, synthetic construct
  REGION 1..11: note = Synthetic polypeptide representing artificial human antibody CDR-L1 region
QSLLHSNGFNY

SEQ ID NO: 1001 - protein, 6 aa, synthetic construct
  REGION 1..6: note = Synthetic polypeptide representing artificial human antibody CDR-L1 region
KLGDKY

SEQ ID NO: 1002 - protein, 6 aa, synthetic construct
  REGION 1..6: note = Synthetic polypeptide representing artificial human antibody CDR-L1 region
ALPKKY

SEQ ID NO: 1003 - protein, 6 aa, synthetic construct
  REGION 1..6: note = Synthetic polypeptide representing artificial human antibody CDR-L1 region
SLRSYY

SEQ ID NO: 1004 - protein, 12 aa, synthetic construct
  REGION 1..12: note = Synthetic polypeptide representing artificial human antibody CDR-L1 region
QSVLYSSSSKNY

SEQ ID NO: 1005 - protein, 11 aa, synthetic construct
  REGION 1..11: note = Synthetic polypeptide representing artificial human antibody CDR-L1 region
QSLLHSNGYNY

SEQ ID NO: 1006 - protein, 9 aa, synthetic construct
  REGION 1..9: note = Synthetic polypeptide representing artificial human antibody CDR-L1 region
SSDVGGYNY

SEQ ID NO: 1007 - protein, 12 aa, synthetic construct
  REGION 1..12: note = Synthetic polypeptide representing artificial human antibody CDR-L1 region
QSVLYSSNNKNY

SEQ ID NO: 1008 - protein, 9 aa, synthetic construct
  REGION 1..9: note = Synthetic polypeptide representing artificial human antibody CDR-L1 region
SSDVGSYNL

SEQ ID NO: 1009 - protein, 6 aa, synthetic construct
  REGION 1..6: note = Synthetic polypeptide representing artificial human antibody CDR-L1 region
ALPKKY

SEQ ID NO: 1010 - protein, 6 aa, synthetic construct
  REGION 1..6: note = Synthetic polypeptide representing artificial human antibody CDR-L1 region
QSVSSN

SEQ ID NO: 1011 - protein, 7 aa, synthetic construct
  REGION 1..7: note = Synthetic polypeptide representing artificial human antibody CDR-L1 region
QSVSSSY

SEQ ID NO: 1012 - protein, 6 aa, synthetic construct
  REGION 1..6: note = Synthetic polypeptide representing artificial human antibody CDR-L1 region
NIGSRS

SEQ ID NO: 1013 - protein, 9 aa, synthetic construct
  REGION 1..9: note = Synthetic polypeptide representing artificial human antibody CDR-L1 region
SSDIGTYNL

SEQ ID NO: 1014 - protein, 12 aa, synthetic construct
  REGION 1..12: note = Synthetic polypeptide representing artificial human antibody CDR-L1 region
QSVLSTSNNKNY

SEQ ID NO: 1015 - protein, 6 aa, synthetic construct
  REGION 1..6: note = Synthetic polypeptide representing artificial human antibody CDR-L1 region
NIGSKS

SEQ ID NO: 1016 - protein, 6 aa, synthetic construct
  REGION 1..6: note = Synthetic polypeptide representing artificial human antibody CDR-L1 region
QHIAGR

SEQ ID NO: 1017 - protein, 8 aa, synthetic construct
  REGION 1..8: note = Synthetic polypeptide representing artificial human antibody CDR-L1 region
SSNIGSNT

SEQ ID NO: 1018 - protein, 8 aa, synthetic construct
  REGION 1..8: note = Synthetic polypeptide representing artificial human antibody CDR-L1 region
SGSIASNY

SEQ ID NO: 1019 - protein, 9 aa, synthetic construct
  REGION 1..9: note = Synthetic polypeptide representing artificial human antibody CDR-L1 region
SSNIGAHYD

SEQ ID NO: 1020 - protein, 6 aa, synthetic construct
  REGION 1..6: note = Synthetic polypeptide representing artificial human antibody CDR-L1 region
QSISSY

SEQ ID NO: 1021 - protein, 6 aa, synthetic construct
  REGION 1..6: note = Synthetic polypeptide representing artificial human antibody CDR-L1 region
QDISNY

SEQ ID NO: 1022 - protein, 7 aa, synthetic construct
  REGION 1..7: note = Synthetic polypeptide representing artificial human antibody CDR-L1 region
QDVASTY

SEQ ID NO: 1023 - protein, 9 aa, synthetic construct
  REGION 1..9: note = Synthetic polypeptide representing artificial human antibody CDR-L1 region
TSDVGTYNL

SEQ ID NO: 1024 - protein, 7 aa, synthetic construct
  REGION 1..7: note = Synthetic polypeptide representing artificial human antibody CDR-L1 region
QSVANNY

SEQ ID NO: 1025 - protein, 7 aa, synthetic construct
  REGION 1..7: note = Synthetic polypeptide representing artificial human antibody CDR-L1 region
QSVSSNY

SEQ ID NO: 1026 - protein, 9 aa, synthetic construct
  REGION 1..9: note = Synthetic polypeptide representing artificial human antibody CDR-L1 region
SGSVSTSFY

SEQ ID NO: 1027 - protein, 9 aa, synthetic construct
  REGION 1..9: note = Synthetic polypeptide representing artificial human antibody CDR-L1 region
SSNIGAQYD

SEQ ID NO: 1028 - protein, 9 aa, synthetic construct
  REGION 1..9: note = Synthetic polypeptide representing artificial human antibody CDR-L1 region
SSNIGAGYD

SEQ ID NO: 1029 - protein, 7 aa, synthetic construct
  REGION 1..7: note = Synthetic polypeptide representing artificial human antibody CDR-L1 region
QSVSSSY

SEQ ID NO: 1030 - protein, 9 aa, synthetic construct
  REGION 1..9: note = Synthetic polypeptide representing artificial human antibody CDR-L1 region
SSDVGGYNY

SEQ ID NO: 1031 - protein, 9 aa, synthetic construct
  REGION 1..9: note = Synthetic polypeptide representing artificial human antibody CDR-L1 region
SSDIGGYDL

SEQ ID NO: 1032 - protein, 12 aa, synthetic construct
  REGION 1..12: note = Synthetic polypeptide representing artificial human antibody CDR-L1 region
QSVLYSSNNKNY

SEQ ID NO: 1033 - protein, 8 aa, synthetic construct
  REGION 1..8: note = Synthetic polypeptide representing artificial human antibody CDR-L1 region
SSNIGSNT

SEQ ID NO: 1034 - protein, 9 aa, synthetic construct
  REGION 1..9: note = Synthetic polypeptide representing artificial human antibody CDR-L1 region
TGVVTTGHY

SEQ ID NO: 1035 - protein, 9 aa, synthetic construct
  REGION 1..9: note = Synthetic polypeptide representing artificial human antibody CDR-L1 region
YSNIGAGYD

SEQ ID NO: 1036 - protein, 6 aa, synthetic construct
  REGION 1..6: note = Synthetic polypeptide representing artificial human antibody CDR-L1 region
QNINRF

SEQ ID NO: 1037 - protein, 6 aa, synthetic construct
  REGION 1..6: note = Synthetic polypeptide representing artificial human antibody CDR-L1 region
QGIRND

SEQ ID NO: 1038 - protein, 6 aa, synthetic construct
  REGION 1..6: note = Synthetic polypeptide representing artificial human antibody CDR-L1 region
SLRTDY

SEQ ID NO: 1039 - protein, 12 aa, synthetic construct
  REGION 1..12: note = Synthetic polypeptide representing artificial human antibody CDR-L1 region
QSVLSSYNNKDY

SEQ ID NO: 1040 - protein, 11 aa, synthetic construct
  REGION 1..11: note = Synthetic polypeptide representing artificial human antibody CDR-L1 region
QSLVYSDGNTY

SEQ ID NO: 1041 - protein, 6 aa, synthetic construct
  REGION 1..6: note = Synthetic polypeptide representing artificial human antibody CDR-L1 region
ALPKKY

SEQ ID NO: 1042 - protein, 6 aa, synthetic construct
  REGION 1..6: note = Synthetic polypeptide representing artificial human antibody CDR-L1 region
NIGSKS

SEQ ID NO: 1043 - protein, 6 aa, synthetic construct
  REGION 1..6: note = Synthetic polypeptide representing artificial human antibody CDR-L1 region
QSISTY

SEQ ID NO: 1044 - protein, 6 aa, synthetic construct
  REGION 1..6: note = Synthetic polypeptide representing artificial human antibody CDR-L1 region
QSVGSD

SEQ ID NO: 1045 - protein, 12 aa, synthetic construct
  REGION 1..12: note = Synthetic polypeptide representing artificial human antibody CDR-L1 region
QSVLYSSNNKNY

SEQ ID NO: 1046 - protein, 6 aa, synthetic construct
  REGION 1..6: note = Synthetic polypeptide representing artificial human antibody CDR-L1 region
ALAKEY

SEQ ID NO: 1047 - protein, 6 aa, synthetic construct
  REGION 1..6: note = Synthetic polypeptide representing artificial human antibody CDR-L1 region
QNIRDF

SEQ ID NO: 1048 - protein, 12 aa, synthetic construct
  REGION 1..12: note = Synthetic polypeptide representing artificial human antibody CDR-L1 region
QTILYSSNNKNY

SEQ ID NO: 1049 - protein, 6 aa, synthetic construct
  REGION 1..6: note = Synthetic polypeptide representing artificial human antibody CDR-L1 region
KLGNKY

SEQ ID NO: 1050 - protein, 8 aa, synthetic construct
  REGION 1..8: note = Synthetic polypeptide representing artificial human antibody CDR-L1 region
RSNIGSNF

SEQ ID NO: 1051 - protein, 8 aa, synthetic construct
  REGION 1..8: note = Synthetic polypeptide representing artificial human antibody CDR-L1 region
SSNIGNNY

SEQ ID NO: 1052 - protein, 6 aa, synthetic construct
  REGION 1..6: note = Synthetic polypeptide representing artificial human antibody CDR-L1 region
QSVSFW

SEQ ID NO: 1053 - protein, 12 aa, synthetic construct
  REGION 1..12: note = Synthetic polypeptide representing artificial human antibody CDR-L1 region
QSVFYSSNNKNY

SEQ ID NO: 1054 - protein, 12 aa, synthetic construct
  REGION 1..12: note = Synthetic polypeptide representing artificial human antibody CDR-L1 region
QSVLYSSNNKNY

SEQ ID NO: 1055 - protein, 9 aa, synthetic construct
  REGION 1..9: note = Synthetic polypeptide representing artificial human antibody CDR-L1 region
SNDIGRYKY

SEQ ID NO: 1056 - protein, 11 aa, synthetic construct
  REGION 1..11: note = Synthetic polypeptide representing artificial human antibody CDR-L1 region
QSLVYSDGNTY

SEQ ID NO: 1057 - protein, 6 aa, synthetic construct
  REGION 1..6: note = Synthetic polypeptide representing artificial human antibody CDR-L1 region
KLGDKY

SEQ ID NO: 1058 - protein, 7 aa, synthetic construct
  REGION 1..7: note = Synthetic polypeptide representing artificial human antibody CDR-L1 region
QRVNSNY

SEQ ID NO: 1059 - protein, 6 aa, synthetic construct
  REGION 1..6: note = Synthetic polypeptide representing artificial human antibody CDR-L1 region
NLGNKY

SEQ ID NO: 1060 - protein, 11 aa, synthetic construct
  REGION 1..11: note = Synthetic polypeptide representing artificial human antibody CDR-L1 region
QSLLHSNGYNY

SEQ ID NO: 1061 - protein, 8 aa, synthetic construct
  REGION 1..8: note = Synthetic polypeptide representing artificial human antibody CDR-L1 region
SSNIGNNY

SEQ ID NO: 1062 - protein, 6 aa, synthetic construct
  REGION 1..6: note = Synthetic polypeptide representing artificial human antibody CDR-L1 region
QSISSW

SEQ ID NO: 1063 - protein, 6 aa, synthetic construct
  REGION 1..6: note = Synthetic polypeptide representing artificial human antibody CDR-L1 region
QSISSW

SEQ ID NO: 1064 - protein, 9 aa, synthetic construct
  REGION 1..9: note = Synthetic polypeptide representing artificial human antibody CDR-L1 region
SSNIGAGYD

SEQ ID NO: 1065 - protein, 6 aa, synthetic construct
  REGION 1..6: note = Synthetic polypeptide representing artificial human antibody CDR-L1 region
ALPKQY

SEQ ID NO: 1066 - protein, 6 aa, synthetic construct
  REGION 1..6: note = Synthetic polypeptide representing artificial human antibody CDR-L1 region
QNIRNN

SEQ ID NO: 1067 - protein, 6 aa, synthetic construct
  REGION 1..6: note = Synthetic polypeptide representing artificial human antibody CDR-L1 region
QSVSSN

SEQ ID NO: 1068 - protein, 6 aa, synthetic construct
  REGION 1..6: note = Synthetic polypeptide representing artificial human antibody CDR-L1 region
QSISSY

SEQ ID NO: 1069 - protein, 6 aa, synthetic construct
  REGION 1..6: note = Synthetic polypeptide representing artificial human antibody CDR-L1 region
QSISTY

SEQ ID NO: 1070 - protein, 7 aa, synthetic construct
  REGION 1..7: note = Synthetic polypeptide representing artificial human antibody CDR-L1 region
QSVTSSY

SEQ ID NO: 1071 - protein, 6 aa, synthetic construct
  REGION 1..6: note = Synthetic polypeptide representing artificial human antibody CDR-L1 region
NIGSKS

SEQ ID NO: 1072 - protein, 8 aa, synthetic construct
  REGION 1..8: note = Synthetic polypeptide representing artificial human antibody CDR-L1 region
SGSIADKY

SEQ ID NO: 1073 - protein, 11 aa, synthetic construct
  REGION 1..11: note = Synthetic polypeptide representing artificial human antibody CDR-L1 region
QSLLHSNGYNY

SEQ ID NO: 1074 - protein, 6 aa, synthetic construct
  REGION 1..6: note = Synthetic polypeptide representing artificial human antibody CDR-L1 region
QSISSW

SEQ ID NO: 1075 - protein, 11 aa, synthetic construct
  REGION 1..11: note = Synthetic polypeptide representing artificial human antibody CDR-L1 region
QSLLYRDGEHY

SEQ ID NO: 1076 - protein, 6 aa, synthetic construct
  REGION 1..6: note = Synthetic polypeptide representing artificial human antibody CDR-L1 region
QSISSY

SEQ ID NO: 1077 - protein, 12 aa, synthetic construct
  REGION 1..12: note = Synthetic polypeptide representing artificial human antibody CDR-L1 region
QSLLYSSNYKNY

SEQ ID NO: 1078 - protein, 8 aa, synthetic construct
  REGION 1..8: note = Synthetic polypeptide representing artificial human antibody CDR-L1 region
SSNIGSNY

SEQ ID NO: 1079 - protein, 9 aa, synthetic construct
  REGION 1..9: note = Synthetic polypeptide representing artificial human antibody CDR-L1 region
SSDVGGYNY

SEQ ID NO: 1080 - protein, 9 aa, synthetic construct
  REGION 1..9: note = Synthetic polypeptide representing artificial human antibody CDR-L1 region
NSNIGAGYD

SEQ ID NO: 1081 - protein, 9 aa, synthetic construct
  REGION 1..9: note = Synthetic polypeptide representing artificial human antibody CDR-L1 region
SDINVTNYN

SEQ ID NO: 1082 - protein, 11 aa, synthetic construct
  REGION 1..11: note = Synthetic polypeptide representing artificial human antibody CDR-L1 region
QSLLHSDGYNY

SEQ ID NO: 1083 - protein, 6 aa, synthetic construct
  REGION 1..6: note = Synthetic polypeptide representing artificial human antibody CDR-L1 region
QGIRND

SEQ ID NO: 1084 - protein, 11 aa, synthetic construct
  REGION 1..11: note = Synthetic polypeptide representing artificial human antibody CDR-L1 region
QSLLHSDGKTY

SEQ ID NO: 1085 - protein, 8 aa, synthetic construct
  REGION 1..8: note = Synthetic polypeptide representing artificial human antibody CDR-H2 region
MSGGGGSI

SEQ ID NO: 1086 - protein, 8 aa, synthetic construct
  REGION 1..8: note = Synthetic polypeptide representing artificial human antibody CDR-H2 region
IKQDGSEK

SEQ ID NO: 1087 - protein, 8 aa, synthetic construct
  REGION 1..8: note = Synthetic polypeptide representing artificial human antibody CDR-H2 region
ISWNSGNI

SEQ ID NO: 1088 - protein, 7 aa, synthetic construct
  REGION 1..7: note = Synthetic polypeptide representing artificial human antibody CDR-H2 region
IYWDDDK

SEQ ID NO: 1089 - protein, 8 aa, synthetic construct
  REGION 1..8: note = Synthetic polypeptide representing artificial human antibody CDR-H2 region
INTSGGST

SEQ ID NO: 1090 - protein, 8 aa, synthetic construct
  REGION 1..8: note = Synthetic polypeptide representing artificial human antibody CDR-H2 region
ISWNSVSI

SEQ ID NO: 1091 - protein, 8 aa, synthetic construct
  REGION 1..8: note = Synthetic polypeptide representing artificial human antibody CDR-H2 region
ITTYNRDT

SEQ ID NO: 1092 - protein, 8 aa, synthetic construct
  REGION 1..8: note = Synthetic polypeptide representing artificial human antibody CDR-H2 region
ISGDGGGT

SEQ ID NO: 1093 - protein, 8 aa, synthetic construct
  REGION 1..8: note = Synthetic polypeptide representing artificial human antibody CDR-H2 region
IRYDGRNK

SEQ ID NO: 1094 - protein, 8 aa, synthetic construct
  REGION 1..8: note = Synthetic polypeptide representing artificial human antibody CDR-H2 region
IGWDSGGI

SEQ ID NO: 1095 - protein, 8 aa, synthetic construct
  REGION 1..8: note = Synthetic polypeptide representing artificial human antibody CDR-H2 region
ISIYSGNT

SEQ ID NO: 1096 - protein, 8 aa, synthetic construct
  REGION 1..8: note = Synthetic polypeptide representing artificial human antibody CDR-H2 region
ISSDGRKI

SEQ ID NO: 1097 - protein, 8 aa, synthetic construct
  REGION 1..8: note = Synthetic polypeptide representing artificial human antibody CDR-H2 region
ISATTGST

SEQ ID NO: 1098 - protein, 9 aa, synthetic construct
  REGION 1..9: note = Synthetic polypeptide representing artificial human antibody CDR-H2 region
TYYRSKWYN

SEQ ID NO: 1099 - protein, 8 aa, synthetic construct
  REGION 1..8: note = Synthetic polypeptide representing artificial human antibody CDR-H2 region
IHYDGRNK

SEQ ID NO: 1100 - protein, 8 aa, synthetic construct
  REGION 1..8: note = Synthetic polypeptide representing artificial human antibody CDR-H2 region
ISSSSSSI

SEQ ID NO: 1101 - protein, 8 aa, synthetic construct
  REGION 1..8: note = Synthetic polypeptide representing artificial human antibody CDR-H2 region
ISAYNGNT

SEQ ID NO: 1102 - protein, 8 aa, synthetic construct
  REGION 1..8: note = Synthetic polypeptide representing artificial human antibody CDR-H2 region
IGIGGNTI

SEQ ID NO: 1103 - protein, 8 aa, synthetic construct
  REGION 1..8: note = Synthetic polypeptide representing artificial human antibody CDR-H2 region
INAGNGNT

SEQ ID NO: 1104 - protein, 7 aa, synthetic construct
  REGION 1..7: note = Synthetic polypeptide representing artificial human antibody CDR-H2 region
VYHSGNA

SEQ ID NO: 1105 - protein, 7 aa, synthetic construct
  REGION 1..7: note = Synthetic polypeptide representing artificial human antibody CDR-H2 region
IYWDDDE

SEQ ID NO: 1106 - protein, 8 aa, synthetic construct
  REGION 1..8: note = Synthetic polypeptide representing artificial human antibody CDR-H2 region
ISWGSSYI

SEQ ID NO: 1107 - protein, 8 aa, synthetic construct
  REGION 1..8: note = Synthetic polypeptide representing artificial human antibody CDR-H2 region
ISSSSRYI

SEQ ID NO: 1108 - protein, 7 aa, synthetic construct
  REGION 1..7: note = Synthetic polypeptide representing artificial human antibody CDR-H2 region
IYYSGNR

SEQ ID NO: 1109 - protein, 7 aa, synthetic construct
  REGION 1..7: note = Synthetic polypeptide representing artificial human antibody CDR-H2 region
IYTSGNT

SEQ ID NO: 1110 - protein, 8 aa, synthetic construct
  REGION 1..8: note = Synthetic polypeptide representing artificial human antibody CDR-H2 region
ISSKSSSK

SEQ ID NO: 1111 - protein, 7 aa, synthetic construct
  REGION 1..7: note = Synthetic polypeptide representing artificial human antibody CDR-H2 region
IYYRGTT

SEQ ID NO: 1112 - protein, 8 aa, synthetic construct
  REGION 1..8: note = Synthetic polypeptide representing artificial human antibody CDR-H2 region
IWYDGSNK

SEQ ID NO: 1113 - protein, 7 aa, synthetic construct
  REGION 1..7: note = Synthetic polypeptide representing artificial human antibody CDR-H2 region
MYTSGST

SEQ ID NO: 1114 - protein, 8 aa, synthetic construct
  REGION 1..8: note = Synthetic polypeptide representing artificial human antibody CDR-H2 region
INPNSGGT

SEQ ID NO: 1115 - protein, 7 aa, synthetic construct
  REGION 1..7: note = Synthetic polypeptide representing artificial human antibody CDR-H2 region
IHHTGSA

SEQ ID NO: 1116 - protein, 7 aa, synthetic construct
  REGION 1..7: note = Synthetic polypeptide representing artificial human antibody CDR-H2 region
IYYSGDT

SEQ ID NO: 1117 - protein, 8 aa, synthetic construct
  REGION 1..8: note = Synthetic polypeptide representing artificial human antibody CDR-H2 region
ISHDGSNK

SEQ ID NO: 1118 - protein, 7 aa, synthetic construct
  REGION 1..7: note = Synthetic polypeptide representing artificial human antibody CDR-H2 region
IYWDDDK

SEQ ID NO: 1119 - protein, 8 aa, synthetic construct
  REGION 1..8: note = Synthetic polypeptide representing artificial human antibody CDR-H2 region
INTTSDPI

SEQ ID NO: 1120 - protein, 8 aa, synthetic construct
  REGION 1..8: note = Synthetic polypeptide representing artificial human antibody CDR-H2 region
IIPIFGTA

SEQ ID NO: 1121 - protein, 7 aa, synthetic construct
  REGION 1..7: note = Synthetic polypeptide representing artificial human antibody CDR-H2 region
IYFSVTT

SEQ ID NO: 1122 - protein, 7 aa, synthetic construct
  REGION 1..7: note = Synthetic polypeptide representing artificial human antibody CDR-H2 region
LSYSGNT

SEQ ID NO: 1123 - protein, 8 aa, synthetic construct
  REGION 1..8: note = Synthetic polypeptide representing artificial human antibody CDR-H2 region
INAGNGDI

SEQ ID NO: 1124 - protein, 8 aa, synthetic construct
  REGION 1..8: note = Synthetic polypeptide representing artificial human antibody CDR-H2 region
ISGSGHST

SEQ ID NO: 1125 - protein, 8 aa, synthetic construct
  REGION 1..8: note = Synthetic polypeptide representing artificial human antibody CDR-H2 region
INWNGGST

SEQ ID NO: 1126 - protein, 8 aa, synthetic construct
  REGION 1..8: note = Synthetic polypeptide representing artificial human antibody CDR-H2 region
ISYDGSNK

SEQ ID NO: 1127 - protein, 7 aa, synthetic construct
  REGION 1..7: note = Synthetic polypeptide representing artificial human antibody CDR-H2 region
IYYSGST

SEQ ID NO: 1128 - protein, 8 aa, synthetic construct
  REGION 1..8: note = Synthetic polypeptide representing artificial human antibody CDR-H2 region
INPNSGGT

SEQ ID NO: 1129 - protein, 7 aa, synthetic construct
  REGION 1..7: note = Synthetic polypeptide representing artificial human antibody CDR-H2 region
IGTAGDT

SEQ ID NO: 1130 - protein, 8 aa, synthetic construct
  REGION 1..8: note = Synthetic polypeptide representing artificial human antibody CDR-H2 region
ISYDGSNS

SEQ ID NO: 1131 - protein, 8 aa, synthetic construct
  REGION 1..8: note = Synthetic polypeptide representing artificial human antibody CDR-H2 region
MSSGGNRR

SEQ ID NO: 1132 - protein, 8 aa, synthetic construct
  REGION 1..8: note = Synthetic polypeptide representing artificial human antibody CDR-H2 region
ISSSGTYI

SEQ ID NO: 1133 - protein, 8 aa, synthetic construct
  REGION 1..8: note = Synthetic polypeptide representing artificial human antibody CDR-H2 region
ISYDGSNK

SEQ ID NO: 1134 - protein, 8 aa, synthetic construct
  REGION 1..8: note = Synthetic polypeptide representing artificial human antibody CDR-H2 region
ISWNSGSI

SEQ ID NO: 1135 - protein, 7 aa, synthetic construct
  REGION 1..7: note = Synthetic polypeptide representing artificial human antibody CDR-H2 region
IYYSGST

SEQ ID NO: 1136 - protein, 8 aa, synthetic construct
  REGION 1..8: note = Synthetic polypeptide representing artificial human antibody CDR-H2 region
IIPIFGTA

SEQ ID NO: 1137 - protein, 8 aa, synthetic construct
  REGION 1..8: note = Synthetic polypeptide representing artificial human antibody CDR-H2 region
INGYNGNT

SEQ ID NO: 1138 - protein, 8 aa, synthetic construct
  REGION 1..8: note = Synthetic polypeptide representing artificial human antibody CDR-H2 region
ITSSGDTI

SEQ ID NO: 1139 - protein, 8 aa, synthetic construct
  REGION 1..8: note = Synthetic polypeptide representing artificial human antibody CDR-H2 region
IIPIFGTT

SEQ ID NO: 1140 - protein, 8 aa, synthetic construct
  REGION 1..8: note = Synthetic polypeptide representing artificial human antibody CDR-H2 region
IYPGDSDT

SEQ ID NO: 1141 - protein, 8 aa, synthetic construct
  REGION 1..8: note = Synthetic polypeptide representing artificial human antibody CDR-H2 region
TWYEGTNE

SEQ ID NO: 1142 - protein, 8 aa, synthetic construct
  REGION 1..8: note = Synthetic polypeptide representing artificial human antibody CDR-H2 region
MSGSGAGT

SEQ ID NO: 1143 - protein, 8 aa, synthetic construct
  REGION 1..8: note = Synthetic polypeptide representing artificial human antibody CDR-H2 region
ISYDGGTK

SEQ ID NO: 1144 - protein, 8 aa, synthetic construct
  REGION 1..8: note = Synthetic polypeptide representing artificial human antibody CDR-H2 region
IWYDGSTK

SEQ ID NO: 1145 - protein, 7 aa, synthetic construct
  REGION 1..7: note = Synthetic polypeptide representing artificial human antibody CDR-H2 region
IYFTGST

SEQ ID NO: 1146 - protein, 8 aa, synthetic construct
  REGION 1..8: note = Synthetic polypeptide representing artificial human antibody CDR-H2 region
IYPGDSDT

SEQ ID NO: 1147 - protein, 7 aa, synthetic construct
  REGION 1..7: note = Synthetic polypeptide representing artificial human antibody CDR-H2 region
IYTSGST

SEQ ID NO: 1148 - protein, 9 aa, synthetic construct
  REGION 1..9: note = Synthetic polypeptide representing artificial human antibody CDR-H2 region
THYRSKWYN

SEQ ID NO: 1149 - protein, 8 aa, synthetic construct
  REGION 1..8: note = Synthetic polypeptide representing artificial human antibody CDR-H2 region
FDPEDGET

SEQ ID NO: 1150 - protein, 8 aa, synthetic construct
  REGION 1..8: note = Synthetic polypeptide representing artificial human antibody CDR-H2 region
ISSSSSYI

SEQ ID NO: 1151 - protein, 8 aa, synthetic construct
  REGION 1..8: note = Synthetic polypeptide representing artificial human antibody CDR-H2 region
ISGSGGST

SEQ ID NO: 1152 - protein, 8 aa, synthetic construct
  REGION 1..8: note = Synthetic polypeptide representing artificial human antibody CDR-H2 region
ITPIFNIT

SEQ ID NO: 1153 - protein, 7 aa, synthetic construct
  REGION 1..7: note = Synthetic polypeptide representing artificial human antibody CDR-H2 region
IYYSGST

SEQ ID NO: 1154 - protein, 8 aa, synthetic construct
  REGION 1..8: note = Synthetic polypeptide representing artificial human antibody CDR-H2 region
ITYDGQIK

SEQ ID NO: 1155 - protein, 7 aa, synthetic construct
  REGION 1..7: note = Synthetic polypeptide representing artificial human antibody CDR-H2 region
IYYSGTT

SEQ ID NO: 1156 - protein, 8 aa, synthetic construct
  REGION 1..8: note = Synthetic polypeptide representing artificial human antibody CDR-H2 region
ISWNSGSI

SEQ ID NO: 1157 - protein, 7 aa, synthetic construct
  REGION 1..7: note = Synthetic polypeptide representing artificial human antibody CDR-H2 region
IYSSGDT

SEQ ID NO: 1158 - protein, 7 aa, synthetic construct
  REGION 1..7: note = Synthetic polypeptide representing artificial human antibody CDR-H2 region
IYWDDDE

SEQ ID NO: 1159 - protein, 8 aa, synthetic construct
  REGION 1..8: note = Synthetic polypeptide representing artificial human antibody CDR-H2 region
VSSSGSTM

SEQ ID NO: 1160 - protein, 8 aa, synthetic construct
  REGION 1..8: note = Synthetic polypeptide representing artificial human antibody CDR-H2 region
IDPSDSYT

SEQ ID NO: 1161 - protein, 8 aa, synthetic construct
  REGION 1..8: note = Synthetic polypeptide representing artificial human antibody CDR-H2 region
IFPADSDT

SEQ ID NO: 1162 - protein, 7 aa, synthetic construct
  REGION 1..7: note = Synthetic polypeptide representing artificial human antibody CDR-H2 region
IFYSGIT

SEQ ID NO: 1163 - protein, 8 aa, synthetic construct
  REGION 1..8: note = Synthetic polypeptide representing artificial human antibody CDR-H2 region
IIPIFGTS

SEQ ID NO: 1164 - protein, 8 aa, synthetic construct
  REGION 1..8: note = Synthetic polypeptide representing artificial human antibody CDR-H2 region
ITWDGSII

SEQ ID NO: 1165 - protein, 8 aa, synthetic construct
  REGION 1..8: note = Synthetic polypeptide representing artificial human antibody CDR-H2 region
INAYQGVT

SEQ ID NO: 1166 - protein, 8 aa, synthetic construct
  REGION 1..8: note = Synthetic polypeptide representing artificial human antibody CDR-H2 region
IKEDGSEK

SEQ ID NO: 1167 - protein, 7 aa, synthetic construct
  REGION 1..7: note = Synthetic polypeptide representing artificial human antibody CDR-H2 region
ISYNGNT

SEQ ID NO: 1168 - protein, 6 aa, synthetic construct
  REGION 1..6: note = Synthetic polypeptide representing artificial human antibody CDR-H2 region
IGSSGT

SEQ ID NO: 1169 - protein, 8 aa, synthetic construct
  REGION 1..8: note = Synthetic polypeptide representing artificial human antibody CDR-H2 region
ISGLGNSI

SEQ ID NO: 1170 - protein, 8 aa, synthetic construct
  REGION 1..8: note = Synthetic polypeptide representing artificial human antibody CDR-H2 region
ISDDGNDK

SEQ ID NO: 1171 - protein, 8 aa, synthetic construct
  REGION 1..8: note = Synthetic polypeptide representing artificial human antibody CDR-H2 region
ISWDGGST

SEQ ID NO: 1172 - protein, 8 aa, synthetic construct
  REGION 1..8: note = Synthetic polypeptide representing artificial human antibody CDR-H2 region
INTNNGKT

SEQ ID NO: 1173 - protein, 8 aa, synthetic construct
  REGION 1..8: note = Synthetic polypeptide representing artificial human antibody CDR-H2 region
IDWSGKTT

SEQ ID NO: 1174 - protein, 8 aa, synthetic construct
  REGION 1..8: note = Synthetic polypeptide representing artificial human antibody CDR-H2 region
ISGSGGST

SEQ ID NO: 1175 - protein, 8 aa, synthetic construct
  REGION 1..8: note = Synthetic polypeptide representing artificial human antibody CDR-H2 region
VSYDGTNK

SEQ ID NO: 1176 - protein, 8 aa, synthetic construct
  REGION 1..8: note = Synthetic polypeptide representing artificial human antibody CDR-H2 region
ITSTSSYL

SEQ ID NO: 1177 - protein, 7 aa, synthetic construct
  REGION 1..7: note = Synthetic polypeptide representing artificial human antibody CDR-H2 region
IYTSGST

SEQ ID NO: 1178 - protein, 7 aa, synthetic construct
  REGION 1..7: note = Synthetic polypeptide representing artificial human antibody CDR-H2 region
VYYSGRT

SEQ ID NO: 1179 - protein, 8 aa, synthetic construct
  REGION 1..8: note = Synthetic polypeptide representing artificial human antibody CDR-H2 region
VSYDGTNK

SEQ ID NO: 1180 - protein, 8 aa, synthetic construct
  REGION 1..8: note = Synthetic polypeptide representing artificial human antibody CDR-H2 region
IYPVDSDT

SEQ ID NO: 1181 - protein, 8 aa, synthetic construct
  REGION 1..8: note = Synthetic polypeptide representing artificial human antibody CDR-H2 region
TGGSGYTK

SEQ ID NO: 1182 - protein, 8 aa, synthetic construct
  REGION 1..8: note = Synthetic polypeptide representing artificial human antibody CDR-H2 region
ISSSGSTI

SEQ ID NO: 1183 - protein, 8 aa, synthetic construct
  REGION 1..8: note = Synthetic polypeptide representing artificial human antibody CDR-H2 region
IKEDGSEK

SEQ ID NO: 1184 - protein, 7 aa, synthetic construct
  REGION 1..7: note = Synthetic polypeptide representing artificial human antibody CDR-H2 region
IYYSGST

SEQ ID NO: 1185 - protein, 8 aa, synthetic construct
  REGION 1..8: note = Synthetic polypeptide representing artificial human antibody CDR-H2 region
ISYDGSNK

SEQ ID NO: 1186 - protein, 8 aa, synthetic construct
  REGION 1..8: note = Synthetic polypeptide representing artificial human antibody CDR-H2 region
IGSSTTAI

SEQ ID NO: 1187 - protein, 7 aa, synthetic construct
  REGION 1..7: note = Synthetic polypeptide representing artificial human antibody CDR-H2 region
ISYSGST

SEQ ID NO: 1188 - protein, 7 aa, synthetic construct
  REGION 1..7: note = Synthetic polypeptide representing artificial human antibody CDR-H2 region
IYYSGST

SEQ ID NO: 1189 - protein, 7 aa, synthetic construct
  REGION 1..7: note = Synthetic polypeptide representing artificial human antibody CDR-H2 region
ISYSGST

SEQ ID NO: 1190 - protein, 8 aa, synthetic construct
  REGION 1..8: note = Synthetic polypeptide representing artificial human antibody CDR-H2 region
IKQDGSEK

SEQ ID NO: 1191 - protein, 8 aa, synthetic construct
  REGION 1..8: note = Synthetic polypeptide representing artificial human antibody CDR-H2 region
ISWNSGSI

SEQ ID NO: 1192 - protein, 8 aa, synthetic construct
  REGION 1..8: note = Synthetic polypeptide representing artificial human antibody CDR-H2 region
IYPGDSDT

SEQ ID NO: 1193 - protein, 9 aa, synthetic construct
  REGION 1..9: note = Synthetic polypeptide representing artificial human antibody CDR-H2 region
TYYRSQWMN

SEQ ID NO: 1194 - protein, 9 aa, synthetic construct
  REGION 1..9: note = Synthetic polypeptide representing artificial human antibody CDR-H2 region
TYYRSKWYN

SEQ ID NO: 1195 - protein, 7 aa, synthetic construct
  REGION 1..7: note = Synthetic polypeptide representing artificial human antibody CDR-H2 region
LFYSGST

SEQ ID NO: 1196 - protein, 8 aa, synthetic construct
  REGION 1..8: note = Synthetic polypeptide representing artificial human antibody CDR-H2 region
IYPGDSDT

SEQ ID NO: 1197 - protein, 8 aa, synthetic construct
  REGION 1..8: note = Synthetic polypeptide representing artificial human antibody CDR-H2 region
IWYDGSNK

SEQ ID NO: 1198 - protein, 8 aa, synthetic construct
  REGION 1..8: note = Synthetic polypeptide representing artificial human antibody CDR-H2 region
ISSSSRYV

SEQ ID NO: 1199 - protein, 8 aa, synthetic construct
  REGION 1..8: note = Synthetic polypeptide representing artificial human antibody CDR-H2 region
IIPILNIT

SEQ ID NO: 1200 - protein, 8 aa, synthetic construct
  REGION 1..8: note = Synthetic polypeptide representing artificial human antibody CDR-H2 region
ISSTSNYI

SEQ ID NO: 1201 - protein, 8 aa, synthetic construct
  REGION 1..8: note = Synthetic polypeptide representing artificial human antibody CDR-H2 region
ISYDGSDE

SEQ ID NO: 1202 - protein, 8 aa, synthetic construct
  REGION 1..8: note = Synthetic polypeptide representing artificial human antibody CDR-H2 region
IWHDGSHK

SEQ ID NO: 1203 - protein, 8 aa, synthetic construct
  REGION 1..8: note = Synthetic polypeptide representing artificial human antibody CDR-H2 region
ISGDGRST

SEQ ID NO: 1204 - protein, 8 aa, synthetic construct
  REGION 1..8: note = Synthetic polypeptide representing artificial human antibody CDR-H2 region
ISDDGKNK

SEQ ID NO: 1205 - protein, 8 aa, synthetic construct
  REGION 1..8: note = Synthetic polypeptide representing artificial human antibody CDR-H2 region
IKQDGSEK

SEQ ID NO: 1206 - protein, 8 aa, synthetic construct
  REGION 1..8: note = Synthetic polypeptide representing artificial human antibody CDR-H2 region
ISSDGSTT

SEQ ID NO: 1207 - protein, 10 aa, synthetic construct
  REGION 1..10: note = Synthetic polypeptide representing artificial human antibody CDR-H2 region
IRSKTDGGTT

SEQ ID NO: 1208 - protein, 7 aa, synthetic construct
  REGION 1..7: note = Synthetic polypeptide representing artificial human antibody CDR-H2 region
ISDIGDT

SEQ ID NO: 1209 - protein, 8 aa, synthetic construct
  REGION 1..8: note = Synthetic polypeptide representing artificial human antibody CDR-H2 region
IIPIFGTA

SEQ ID NO: 1210 - protein, 7 aa, synthetic construct
  REGION 1..7: note = Synthetic polypeptide representing artificial human antibody CDR-H2 region
IYFSGKT

SEQ ID NO: 1211 - protein, 8 aa, synthetic construct
  REGION 1..8: note = Synthetic polypeptide representing artificial human antibody CDR-H2 region
INRDGSYT

SEQ ID NO: 1212 - protein, 7 aa, synthetic construct
  REGION 1..7: note = Synthetic polypeptide representing artificial human antibody CDR-H2 region
VYYSGST

SEQ ID NO: 1213 - protein, 7 aa, synthetic construct
  REGION 1..7: note = Synthetic polypeptide representing artificial human antibody CDR-H2 region
VSPSGTN

SEQ ID NO: 1214 - protein, 8 aa, synthetic construct
  REGION 1..8: note = Synthetic polypeptide representing artificial human antibody CDR-H2 region
IIPIVGEA

SEQ ID NO: 1215 - protein, 8 aa, synthetic construct
  REGION 1..8: note = Synthetic polypeptide representing artificial human antibody CDR-H2 region
INSDGSST

SEQ ID NO: 1216 - protein, 7 aa, synthetic construct
  REGION 1..7: note = Synthetic polypeptide representing artificial human antibody CDR-H2 region
IYYNGST

SEQ ID NO: 1217 - protein, 8 aa, synthetic construct
  REGION 1..8: note = Synthetic polypeptide representing artificial human antibody CDR-H2 region
ISGSGGST

SEQ ID NO: 1218 - protein, 8 aa, synthetic construct
  REGION 1..8: note = Synthetic polypeptide representing artificial human antibody CDR-H2 region
ISASGRTT

SEQ ID NO: 1219 - protein, 8 aa, synthetic construct
  REGION 1..8: note = Synthetic polypeptide representing artificial human antibody CDR-H2 region
ITANGGST

SEQ ID NO: 1220 - protein, 7 aa, synthetic construct
  REGION 1..7: note = Synthetic polypeptide representing artificial human antibody CDR-H2 region
IYHRGTS

SEQ ID NO: 1221 - protein, 8 aa, synthetic construct
  REGION 1..8: note = Synthetic polypeptide representing artificial human antibody CDR-H2 region
ISFDGSNQ

SEQ ID NO: 1222 - protein, 8 aa, synthetic construct
  REGION 1..8: note = Synthetic polypeptide representing artificial human antibody CDR-H2 region
IDPSGGSR

SEQ ID NO: 1223 - protein, 8 aa, synthetic construct
  REGION 1..8: note = Synthetic polypeptide representing artificial human antibody CDR-H2 region
INTDGSST

SEQ ID NO: 1224 - protein, 8 aa, synthetic construct
  REGION 1..8: note = Synthetic polypeptide representing artificial human antibody CDR-H2 region
FDPEGGET

SEQ ID NO: 1225 - protein, 7 aa, synthetic construct
  REGION 1..7: note = Synthetic polypeptide representing artificial human antibody CDR-H2 region
IYYNGDT

SEQ ID NO: 1226 - protein, 8 aa, synthetic construct
  REGION 1..8: note = Synthetic polypeptide representing artificial human antibody CDR-H2 region
ISAYTGNT

SEQ ID NO: 1227 - protein, 8 aa, synthetic construct
  REGION 1..8: note = Synthetic polypeptide representing artificial human antibody CDR-H2 region
IIWNSGTT

SEQ ID NO: 1228 - protein, 8 aa, synthetic construct
  REGION 1..8: note = Synthetic polypeptide representing artificial human antibody CDR-H2 region
INTDGSRG

SEQ ID NO: 1229 - protein, 7 aa, synthetic construct
  REGION 1..7: note = Synthetic polypeptide representing artificial human antibody CDR-H2 region
IYHSGST

SEQ ID NO: 1230 - protein, 10 aa, synthetic construct
  REGION 1..10: note = Synthetic polypeptide representing artificial human antibody CDR-H2 region
IKSKSDGGST

SEQ ID NO: 1231 - protein, 7 aa, synthetic construct
  REGION 1..7: note = Synthetic polypeptide representing artificial human antibody CDR-H2 region
IYSGGTT

SEQ ID NO: 1232 - protein, 10 aa, synthetic construct
  REGION 1..10: note = Synthetic polypeptide representing artificial human antibody CDR-H2 region
IKNRANSYNT

SEQ ID NO: 1233 - protein, 8 aa, synthetic construct
  REGION 1..8: note = Synthetic polypeptide representing artificial human antibody CDR-H2 region
ISFDGSDK

SEQ ID NO: 1234 - protein, 8 aa, synthetic construct
  REGION 1..8: note = Synthetic polypeptide representing artificial human antibody CDR-H2 region
ITAGGSFI

SEQ ID NO: 1235 - protein, 8 aa, synthetic construct
  REGION 1..8: note = Synthetic polypeptide representing artificial human antibody CDR-H2 region
INPNSGGT

SEQ ID NO: 1236 - protein, 8 aa, synthetic construct
  REGION 1..8: note = Synthetic polypeptide representing artificial human antibody CDR-H2 region
ISYSGGST

SEQ ID NO: 1237 - protein, 8 aa, synthetic construct
  REGION 1..8: note = Synthetic polypeptide representing artificial human antibody CDR-H2 region
ISSSGGDI

SEQ ID NO: 1238 - protein, 8 aa, synthetic construct
  REGION 1..8: note = Synthetic polypeptide representing artificial human antibody CDR-H2 region
ISWNSGDI

SEQ ID NO: 1239 - skipped

SEQ ID NO: 1240 - protein, 8 aa, synthetic construct
  REGION 1..8: note = Synthetic polypeptide representing artificial human antibody CDR-H2 region
IGGSGGYT

SEQ ID NO: 1241 - protein, 7 aa, synthetic construct
  REGION 1..7: note = Synthetic polypeptide representing artificial human antibody CDR-H2 region
IFHSGSA

SEQ ID NO: 1242 - protein, 8 aa, synthetic construct
  REGION 1..8: note = Synthetic polypeptide representing artificial human antibody CDR-H2 region
MITTFGKA

SEQ ID NO: 1243 - protein, 7 aa, synthetic construct
  REGION 1..7: note = Synthetic polypeptide representing artificial human antibody CDR-H2 region
IYYSGST

SEQ ID NO: 1244 - protein, 8 aa, synthetic construct
  REGION 1..8: note = Synthetic polypeptide representing artificial human antibody CDR-H2 region
ISAYNGNT

SEQ ID NO: 1245 - protein, 8 aa, synthetic construct
  REGION 1..8: note = Synthetic polypeptide representing artificial human antibody CDR-H2 region
INTVTGIP

SEQ ID NO: 1246 - protein, 7 aa, synthetic construct
  REGION 1..7: note = Synthetic polypeptide representing artificial human antibody CDR-H2 region
VYYSGST

SEQ ID NO: 1247 - protein, 8 aa, synthetic construct
  REGION 1..8: note = Synthetic polypeptide representing artificial human antibody CDR-H2 region
IAYDGSQK

SEQ ID NO: 1248 - protein, 8 aa, synthetic construct
  REGION 1..8: note = Synthetic polypeptide representing artificial human antibody CDR-H2 region
IIPVFGTT

SEQ ID NO: 1249 - protein, 8 aa, synthetic construct
  REGION 1..8: note = Synthetic polypeptide representing artificial human antibody CDR-H2 region
INAGNGDT

SEQ ID NO: 1250 - protein, 7 aa, synthetic construct
  REGION 1..7: note = Synthetic polypeptide representing artificial human antibody CDR-H2 region
IYHSGST

SEQ ID NO: 1251 - protein, 8 aa, synthetic construct
  REGION 1..8: note = Synthetic polypeptide representing artificial human antibody CDR-H2 region
VEGYRSEE

SEQ ID NO: 1252 - protein, 8 aa, synthetic construct
  REGION 1..8: note = Synthetic polypeptide representing artificial human antibody CDR-H2 region
ISASGGGT

SEQ ID NO: 1253 - protein, 7 aa, synthetic construct
  REGION 1..7: note = Synthetic polypeptide representing artificial human antibody CDR-H2 region
IYYSGTS

SEQ ID NO: 1254 - protein, 8 aa, synthetic construct
  REGION 1..8: note = Synthetic polypeptide representing artificial human antibody CDR-H2 region
INPKTGDT

SEQ ID NO: 1255 - protein, 8 aa, synthetic construct
  REGION 1..8: note = Synthetic polypeptide representing artificial human antibody CDR-H2 region
ISYDGSNK

SEQ ID NO: 1256 - protein, 8 aa, synthetic construct
  REGION 1..8: note = Synthetic polypeptide representing artificial human antibody CDR-H2 region
ISSSSSYI

SEQ ID NO: 1257 - protein, 7 aa, synthetic construct
  REGION 1..7: note = Synthetic polypeptide representing artificial human antibody CDR-H2 region
IYYSGST

SEQ ID NO: 1258 - protein, 10 aa, synthetic construct
  REGION 1..10: note = Synthetic polypeptide representing artificial human antibody CDR-H2 region
IKSKTDGGTT

SEQ ID NO: 1259 - protein, 8 aa, synthetic construct
  REGION 1..8: note = Synthetic polypeptide representing artificial human antibody CDR-H2 region
INPSFGST

SEQ ID NO: 1260 - protein, 8 aa, synthetic construct
  REGION 1..8: note = Synthetic polypeptide representing artificial human antibody CDR-H2 region
IMPMFGRT

SEQ ID NO: 1261 - protein, 8 aa, synthetic construct
  REGION 1..8: note = Synthetic polypeptide representing artificial human antibody CDR-H2 region
ISSTGTTT

SEQ ID NO: 1262 - protein, 8 aa, synthetic construct
  REGION 1..8: note = Synthetic polypeptide representing artificial human antibody CDR-H2 region
ISNDGSNK

SEQ ID NO: 1263 - protein, 8 aa, synthetic construct
  REGION 1..8: note = Synthetic polypeptide representing artificial human antibody CDR-H2 region
IYPGDSDT

SEQ ID NO: 1264 - protein, 8 aa, synthetic construct
  REGION 1..8: note = Synthetic polypeptide representing artificial human antibody CDR-H2 region
ISRGSSVI

SEQ ID NO: 1265 - protein, 7 aa, synthetic construct
  REGION 1..7: note = Synthetic polypeptide representing artificial human antibody CDR-H2 region
IFSNDEK

SEQ ID NO: 1266 - protein, 8 aa, synthetic construct
  REGION 1..8: note = Synthetic polypeptide representing artificial human antibody CDR-H2 region
INPNSGGT

SEQ ID NO: 1267 - protein, 8 aa, synthetic construct
  REGION 1..8: note = Synthetic polypeptide representing artificial human antibody CDR-H2 region
ISAYNGNT

SEQ ID NO: 1268 - protein, 9 aa, synthetic construct
  REGION 1..9: note = Synthetic polypeptide representing artificial human antibody CDR-H2 region
TFYRTKWYS

SEQ ID NO: 1269 - protein, 7 aa, synthetic construct
  REGION 1..7: note = Synthetic polypeptide representing artificial human antibody CDR-H2 region
ICHSGST

SEQ ID NO: 1270 - protein, 7 aa, synthetic construct
  REGION 1..7: note = Synthetic polypeptide representing artificial human antibody CDR-H2 region
IYSGGST

SEQ ID NO: 1271 - protein, 8 aa, synthetic construct
  REGION 1..8: note = Synthetic polypeptide representing artificial human antibody CDR-H2 region
INPNGGTT

SEQ ID NO: 1272 - protein, 7 aa, synthetic construct
  REGION 1..7: note = Synthetic polypeptide representing artificial human antibody CDR-H2 region
IYYSGST

SEQ ID NO: 1273 - protein, 7 aa, synthetic construct
  REGION 1..7: note = Synthetic polypeptide representing artificial human antibody CDR-H2 region
IHYTGST

SEQ ID NO: 1274 - protein, 8 aa, synthetic construct
  REGION 1..8: note = Synthetic polypeptide representing artificial human antibody CDR-H2 region
ISYDGSNK

SEQ ID NO: 1275 - protein, 8 aa, synthetic construct
  REGION 1..8: note = Synthetic polypeptide representing artificial human antibody CDR-H2 region
ISGSGGST

SEQ ID NO: 1276 - protein, 7 aa, synthetic construct
  REGION 1..7: note = Synthetic polypeptide representing artificial human antibody CDR-H2 region
IYYSGST

SEQ ID NO: 1277 - protein, 8 aa, synthetic construct
  REGION 1..8: note = Synthetic polypeptide representing artificial human antibody CDR-H2 region
INPNSGGT

SEQ ID NO: 1278 - protein, 8 aa, synthetic construct
  REGION 1..8: note = Synthetic polypeptide representing artificial human antibody CDR-H2 region
INPADSDT

SEQ ID NO: 1279 - protein, 8 aa, synthetic construct
  REGION 1..8: note = Synthetic polypeptide representing artificial human antibody CDR-H2 region
IYPADSDT

SEQ ID NO: 1280 - protein, 8 aa, synthetic construct
  REGION 1..8: note = Synthetic polypeptide representing artificial human antibody CDR-H2 region
ISYSGNTT

SEQ ID NO: 1281 - protein, 8 aa, synthetic construct
  REGION 1..8: note = Synthetic polypeptide representing artificial human antibody CDR-H2 region
INPGGGST

SEQ ID NO: 1282 - protein, 8 aa, synthetic construct
  REGION 1..8: note = Synthetic polypeptide representing artificial human antibody CDR-H2 region
ITSPGGHT

SEQ ID NO: 1283 - protein, 8 aa, synthetic construct
  REGION 1..8: note = Synthetic polypeptide representing artificial human antibody CDR-H2 region
ISGSGGST

SEQ ID NO: 1284 - protein, 8 aa, synthetic construct
  REGION 1..8: note = Synthetic polypeptide representing artificial human antibody CDR-H2 region
INPVNGVT

SEQ ID NO: 1285 - protein, 8 aa, synthetic construct
  REGION 1..8: note = Synthetic polypeptide representing artificial human antibody CDR-H2 region
INTNTGNP

SEQ ID NO: 1286 - protein, 8 aa, synthetic construct
  REGION 1..8: note = Synthetic polypeptide representing artificial human antibody CDR-H2 region
ISSDGSNK

SEQ ID NO: 1287 - protein, 8 aa, synthetic construct
  REGION 1..8: note = Synthetic polypeptide representing artificial human antibody CDR-H2 region
VSGSGFTT

SEQ ID NO: 1288 - protein, 8 aa, synthetic construct
  REGION 1..8: note = Synthetic polypeptide representing artificial human antibody CDR-H2 region
ISSSSSYI

SEQ ID NO: 1289 - protein, 7 aa, synthetic construct
  REGION 1..7: note = Synthetic polypeptide representing artificial human antibody CDR-H2 region
INWDDDK

SEQ ID NO: 1290 - protein, 7 aa, synthetic construct
  REGION 1..7: note = Synthetic polypeptide representing artificial human antibody CDR-H2 region
IYWDDDT

SEQ ID NO: 1291 - protein, 7 aa, synthetic construct
  REGION 1..7: note = Synthetic polypeptide representing artificial human antibody CDR-H2 region
IYYIGTT

SEQ ID NO: 1292 - protein, 8 aa, synthetic construct
  REGION 1..8: note = Synthetic polypeptide representing artificial human antibody CDR-H2 region
INQDGGEK

SEQ ID NO: 1293 - protein, 8 aa, synthetic construct
  REGION 1..8: note = Synthetic polypeptide representing artificial human antibody CDR-H2 region
IIPVFGPP

SEQ ID NO: 1294 - protein, 8 aa, synthetic construct
  REGION 1..8: note = Synthetic polypeptide representing artificial human antibody CDR-H2 region
IVPIFDTT

SEQ ID NO: 1295 - protein, 8 aa, synthetic construct
  REGION 1..8: note = Synthetic polypeptide representing artificial human antibody CDR-H2 region
INAGNGNT

SEQ ID NO: 1296 - protein, 8 aa, synthetic construct
  REGION 1..8: note = Synthetic polypeptide representing artificial human antibody CDR-H2 region
ISPYNGNI

SEQ ID NO: 1297 - protein, 8 aa, synthetic construct
  REGION 1..8: note = Synthetic polypeptide representing artificial human antibody CDR-H2 region
ISGPGESS

SEQ ID NO: 1298 - protein, 8 aa, synthetic construct
  REGION 1..8: note = Synthetic polypeptide representing artificial human antibody CDR-H2 region
INPSGGYT

SEQ ID NO: 1299 - protein, 8 aa, synthetic construct
  REGION 1..8: note = Synthetic polypeptide representing artificial human antibody CDR-H2 region
VFPGDSDI

SEQ ID NO: 1300 - protein, 8 aa, synthetic construct
  REGION 1..8: note = Synthetic polypeptide representing artificial human antibody CDR-H2 region
IWYDGTNK

SEQ ID NO: 1301 - protein, 8 aa, synthetic construct
  REGION 1..8: note = Synthetic polypeptide representing artificial human antibody CDR-H2 region
IDPSDSYT

SEQ ID NO: 1302 - protein, 8 aa, synthetic construct
  REGION 1..8: note = Synthetic polypeptide representing artificial human antibody CDR-H2 region
ISGDGTRT

SEQ ID NO: 1303 - protein, 8 aa, synthetic construct
  REGION 1..8: note = Synthetic polypeptide representing artificial human antibody CDR-H2 region
TYHRTTTT

SEQ ID NO: 1304 - protein, 8 aa, synthetic construct
  REGION 1..8: note = Synthetic polypeptide representing artificial human antibody CDR-H2 region
ITPNSGTP

SEQ ID NO: 1305 - protein, 10 aa, synthetic construct
  REGION 1..10: note = Synthetic polypeptide representing artificial human antibody CDR-H2 region
IRSKAYGGTR

SEQ ID NO: 1306 - protein, 8 aa, synthetic construct
  REGION 1..8: note = Synthetic polypeptide representing artificial human antibody CDR-H2 region
ISGYNGRT

SEQ ID NO: 1307 - protein, 8 aa, synthetic construct
  REGION 1..8: note = Synthetic polypeptide representing artificial human antibody CDR-H2 region
MNADGSEK

SEQ ID NO: 1308 - protein, 8 aa, synthetic construct
  REGION 1..8: note = Synthetic polypeptide representing artificial human antibody CDR-H2 region
ISSSSSTI

SEQ ID NO: 1309 - protein, 7 aa, synthetic construct
  REGION 1..7: note = Synthetic polypeptide representing artificial human antibody CDR-H2 region
IYYSGST

SEQ ID NO: 1310 - protein, 7 aa, synthetic construct
  REGION 1..7: note = Synthetic polypeptide representing artificial human antibody CDR-H2 region
MFYGGST

SEQ ID NO: 1311 - protein, 8 aa, synthetic construct
  REGION 1..8: note = Synthetic polypeptide representing artificial human antibody CDR-H2 region
IWYDGSNE

SEQ ID NO: 1312 - protein, 8 aa, synthetic construct
  REGION 1..8: note = Synthetic polypeptide representing artificial human antibody CDR-H2 region
ISTDSGNT

SEQ ID NO: 1313 - protein, 8 aa, synthetic construct
  REGION 1..8: note = Synthetic polypeptide representing artificial human antibody CDR-H2 region
IHWNGGST

SEQ ID NO: 1314 - protein, 8 aa, synthetic construct
  REGION 1..8: note = Synthetic polypeptide representing artificial human antibody CDR-H2 region
MWYDGNNK

SEQ ID NO: 1315 - protein, 8 aa, synthetic construct
  REGION 1..8: note = Synthetic polypeptide representing artificial human antibody CDR-H2 region
ISGSGGRT

SEQ ID NO: 1316 - protein, 10 aa, synthetic construct
  REGION 1..10: note = Synthetic polypeptide representing artificial human antibody CDR-H2 region
IKTKTDGGTT

SEQ ID NO: 1317 - protein, 8 aa, synthetic construct
  REGION 1..8: note = Synthetic polypeptide representing artificial human antibody CDR-H2 region
IWHDGSKT

SEQ ID NO: 1318 - protein, 8 aa, synthetic construct
  REGION 1..8: note = Synthetic polypeptide representing artificial human antibody CDR-H2 region
ISPYTRQT

SEQ ID NO: 1319 - protein, 8 aa, synthetic construct
  REGION 1..8: note = Synthetic polypeptide representing artificial human antibody CDR-H2 region
TRFDGSEK

SEQ ID NO: 1320 - protein, 8 aa, synthetic construct
  REGION 1..8: note = Synthetic polypeptide representing artificial human antibody CDR-H2 region
ISHDGSNN

SEQ ID NO: 1321 - protein, 8 aa, synthetic construct
  REGION 1..8: note = Synthetic polypeptide representing artificial human antibody CDR-H2 region
IHVGNDHT

SEQ ID NO: 1322 - protein, 8 aa, synthetic construct
  REGION 1..8: note = Synthetic polypeptide representing artificial human antibody CDR-H2 region
FDPSDSYN

SEQ ID NO: 1323 - protein, 7 aa, synthetic construct
  REGION 1..7: note = Synthetic polypeptide representing artificial human antibody CDR-H2 region
IYWDDDK

SEQ ID NO: 1324 - protein, 8 aa, synthetic construct
  REGION 1..8: note = Synthetic polypeptide representing artificial human antibody CDR-H2 region
ISGDSRDI

SEQ ID NO: 1325 - protein, 8 aa, synthetic construct
  REGION 1..8: note = Synthetic polypeptide representing artificial human antibody CDR-H2 region
IIPVLGIP

SEQ ID NO: 1326 - protein, 7 aa, synthetic construct
  REGION 1..7: note = Synthetic polypeptide representing artificial human antibody CDR-H2 region
VYYSGNT

SEQ ID NO: 1327 - protein, 8 aa, synthetic construct
  REGION 1..8: note = Synthetic polypeptide representing artificial human antibody CDR-H2 region
ISSNGGST

SEQ ID NO: 1328 - protein, 8 aa, synthetic construct
  REGION 1..8: note = Synthetic polypeptide representing artificial human antibody CDR-H2 region
ISSSRSTI

SEQ ID NO: 1329 - protein, 7 aa, synthetic construct
  REGION 1..7: note = Synthetic polypeptide representing artificial human antibody CDR-H2 region
IIHTGTT

SEQ ID NO: 1330 - protein, 8 aa, synthetic construct
  REGION 1..8: note = Synthetic polypeptide representing artificial human antibody CDR-H2 region
INTDGTVT

SEQ ID NO: 1331 - protein, 7 aa, synthetic construct
  REGION 1..7: note = Synthetic polypeptide representing artificial human antibody CDR-H2 region
IYWDDDK

SEQ ID NO: 1332 - protein, 8 aa, synthetic construct
  REGION 1..8: note = Synthetic polypeptide representing artificial human antibody CDR-H2 region
ISYDGSNK

SEQ ID NO: 1333 - protein, 8 aa, synthetic construct
  REGION 1..8: note = Synthetic polypeptide representing artificial human antibody CDR-H2 region
ISSSGSTI

SEQ ID NO: 1334 - protein, 8 aa, synthetic construct
  REGION 1..8: note = Synthetic polypeptide representing artificial human antibody CDR-H2 region
ISSSSSTI

SEQ ID NO: 1335 - protein, 7 aa, synthetic construct
  REGION 1..7: note = Synthetic polypeptide representing artificial human antibody CDR-H2 region
IDWDDDK

SEQ ID NO: 1336 - protein, 8 aa, synthetic construct
  REGION 1..8: note = Synthetic polypeptide representing artificial human antibody CDR-H2 region
IKQDGSEK

SEQ ID NO: 1337 - protein, 8 aa, synthetic construct
  REGION 1..8: note = Synthetic polypeptide representing artificial human antibody CDR-H2 region
FVGSGDTT

SEQ ID NO: 1338 - protein, 8 aa, synthetic construct
  REGION 1..8: note = Synthetic polypeptide representing artificial human antibody CDR-H2 region
ISSSSSTK

SEQ ID NO: 1339 - protein, 8 aa, synthetic construct
  REGION 1..8: note = Synthetic polypeptide representing artificial human antibody CDR-H2 region
INPKTGAT

SEQ ID NO: 1340 - protein, 7 aa, synthetic construct
  REGION 1..7: note = Synthetic polypeptide representing artificial human antibody CDR-H2 region
IYASGST

SEQ ID NO: 1341 - protein, 8 aa, synthetic construct
  REGION 1..8: note = Synthetic polypeptide representing artificial human antibody CDR-H2 region
IYPGDSDT

SEQ ID NO: 1342 - protein, 10 aa, synthetic construct
  REGION 1..10: note = Synthetic polypeptide representing artificial human antibody CDR-H2 region
IKSKTDGGTT

SEQ ID NO: 1343 - protein, 8 aa, synthetic construct
  REGION 1..8: note = Synthetic polypeptide representing artificial human antibody CDR-H2 region
ISKDGNSK

SEQ ID NO: 1344 - protein, 10 aa, synthetic construct
  REGION 1..10: note = Synthetic polypeptide representing artificial human antibody CDR-H2 region
IRSKTKNYAT

SEQ ID NO: 1345 - protein, 7 aa, synthetic construct
  REGION 1..7: note = Synthetic polypeptide representing artificial human antibody CDR-H2 region
IYTSGST

SEQ ID NO: 1346 - protein, 10 aa, synthetic construct
  REGION 1..10: note = Synthetic polypeptide representing artificial human antibody CDR-H2 region
ISTKGYDETA

SEQ ID NO: 1347 - protein, 8 aa, synthetic construct
  REGION 1..8: note = Synthetic polypeptide representing artificial human antibody CDR-H2 region
IPYDGSNK

SEQ ID NO: 1348 - protein, 8 aa, synthetic construct
  REGION 1..8: note = Synthetic polypeptide representing artificial human antibody CDR-H2 region
ISTSTSTI

SEQ ID NO: 1349 - protein, 8 aa, synthetic construct
  REGION 1..8: note = Synthetic polypeptide representing artificial human antibody CDR-H2 region
ISSSGSTI

SEQ ID NO: 1350 - protein, 8 aa, synthetic construct
  REGION 1..8: note = Synthetic polypeptide representing artificial human antibody CDR-H2 region
ISSSSSTI

SEQ ID NO: 1351 - protein, 7 aa, synthetic construct
  REGION 1..7: note = Synthetic polypeptide representing artificial human antibody CDR-H2 region
MYSGGAT

SEQ ID NO: 1352 - protein, 8 aa, synthetic construct
  REGION 1..8: note = Synthetic polypeptide representing artificial human antibody CDR-H2 region
IYPGDSDT

SEQ ID NO: 1353 - protein, 10 aa, synthetic construct
  REGION 1..10: note = Synthetic polypeptide representing artificial human antibody CDR-H2 region
IRSKPNSYAT

SEQ ID NO: 1354 - protein, 8 aa, synthetic construct
  REGION 1..8: note = Synthetic polypeptide representing artificial human antibody CDR-H2 region
IWYDGSNE

SEQ ID NO: 1355 - protein, 8 aa, synthetic construct
  REGION 1..8: note = Synthetic polypeptide representing artificial human antibody CDR-H2 region
IWYDGSNK

SEQ ID NO: 1356-1508 - skipped (153 entries)

SEQ ID NO: 1509 - protein, 7 aa, synthetic construct
  REGION 1..7: note = Synthetic polypeptide representing artificial human antibody CDR-L2 region
LNSDGSH

SEQ ID NO: 1510-1622 - skipped (113 entries)

SEQ ID NO: 1623 - protein, 7 aa, synthetic construct
  REGION 1..7: note = Synthetic polypeptide representing artificial human antibody CDR-L2 region
QYSDSDK

SEQ ID NO: 1624-1626 - skipped (3 entries)

SEQ ID NO: 1627 - protein, 14 aa, synthetic construct
  REGION 1..14: note = Synthetic polypeptide representing artificial human antibody CDR-H3 region
ARVTLGSYFYGMDV

SEQ ID NO: 1628 - protein, 15 aa, synthetic construct
  REGION 1..15: note = Synthetic polypeptide representing artificial human antibody CDR-H3 region
ARDGGSGSYFDCFDY

SEQ ID NO: 1629 - protein, 18 aa, synthetic construct
  REGION 1..18: note = Synthetic polypeptide representing artificial human antibody CDR-H3 region
AKDINFFGLGTGGGAMDV

SEQ ID NO: 1630 - protein, 11 aa, synthetic construct
  REGION 1..11: note = Synthetic polypeptide representing artificial human antibody CDR-H3 region
AHRAIVGLFDY

SEQ ID NO: 1631 - protein, 14 aa, synthetic construct
  REGION 1..14: note = Synthetic polypeptide representing artificial human antibody CDR-H3 region
ARGGDGGPQDAFDI

SEQ ID NO: 1632 - protein, 17 aa, synthetic construct
  REGION 1..17: note = Synthetic polypeptide representing artificial human antibody CDR-H3 region
VKSFSAEYYYYYYGMDV

SEQ ID NO: 1633 - protein, 15 aa, synthetic construct
  REGION 1..15: note = Synthetic polypeptide representing artificial human antibody CDR-H3 region
ARVVPGDSVYGAFDI

SEQ ID NO: 1634 - protein, 13 aa, synthetic construct
  REGION 1..13: note = Synthetic polypeptide representing artificial human antibody CDR-H3 region
AKRTPFGEWAFDY

SEQ ID NO: 1635 - protein, 17 aa, synthetic construct
  REGION 1..17: note = Synthetic polypeptide representing artificial human antibody CDR-H3 region
AKDPGTFRDHLWSGVDY

SEQ ID NO: 1636 - protein, 16 aa, synthetic construct
  REGION 1..16: note = Synthetic polypeptide representing artificial human antibody CDR-H3 region
AKAAATLPYFRFAMDV

SEQ ID NO: 1637 - protein, 17 aa, synthetic construct
  REGION 1..17: note = Synthetic polypeptide representing artificial human antibody CDR-H3 region
ARVGVFKGLAPFGGFDP

SEQ ID NO: 1638 - protein, 11 aa, synthetic construct
  REGION 1..11: note = Synthetic polypeptide representing artificial human antibody CDR-H3 region
ARDSGGTPGPY

SEQ ID NO: 1639 - protein, 16 aa, synthetic construct
  REGION 1..16: note = Synthetic polypeptide representing artificial human antibody CDR-H3 region
VRSFVGAVPAYPNFDF

SEQ ID NO: 1640 - protein, 11 aa, synthetic construct
  REGION 1..11: note = Synthetic polypeptide representing artificial human antibody CDR-H3 region
VRGVVGATLDN

SEQ ID NO: 1641 - protein, 17 aa, synthetic construct
  REGION 1..17: note = Synthetic polypeptide representing artificial human antibody CDR-H3 region
VKDSRVTGQSSGYIFDS

SEQ ID NO: 1642 - protein, 11 aa, synthetic construct
  REGION 1..11: note = Synthetic polypeptide representing artificial human antibody CDR-H3 region
ARPRLGWYFDL

SEQ ID NO: 1643 - protein, 13 aa, synthetic construct
  REGION 1..13: note = Synthetic polypeptide representing artificial human antibody CDR-H3 region
ARETAGQLIPFDY

SEQ ID NO: 1644 - protein, 17 aa, synthetic construct
  REGION 1..17: note = Synthetic polypeptide representing artificial human antibody CDR-H3 region
ARDYMGVDFYYYYGMDV

SEQ ID NO: 1645 - protein, 14 aa, synthetic construct
  REGION 1..14: note = Synthetic polypeptide representing artificial human antibody CDR-H3 region
ARDIAVAITNYFGS

SEQ ID NO: 1646 - protein, 11 aa, synthetic construct
  REGION 1..11: note = Synthetic polypeptide representing artificial human antibody CDR-H3 region
AREHRSGYQRY

SEQ ID NO: 1647 - protein, 11 aa, synthetic construct
  REGION 1..11: note = Synthetic polypeptide representing artificial human antibody CDR-H3 region
AHFSTVINFGH

SEQ ID NO: 1648 - protein, 11 aa, synthetic construct
  REGION 1..11: note = Synthetic polypeptide representing artificial human antibody CDR-H3 region
ACRRIYQGFDP

SEQ ID NO: 1649 - protein, 10 aa, synthetic construct
  REGION 1..10: note = Synthetic polypeptide representing artificial human antibody CDR-H3 region
ARDRATSFDY

SEQ ID NO: 1650 - protein, 9 aa, synthetic construct
  REGION 1..9: note = Synthetic polypeptide representing artificial human antibody CDR-H3 region
ARGRGEMDV

SEQ ID NO: 1651 - protein, 14 aa, synthetic construct
  REGION 1..14: note = Synthetic polypeptide representing artificial human antibody CDR-H3 region
ATTPSSSWYWYFDP

SEQ ID NO: 1652 - protein, 16 aa, synthetic construct
  REGION 1..16: note = Synthetic polypeptide representing artificial human antibody CDR-H3 region
ARDLELIIAAGAPLDH

SEQ ID NO: 1653 - protein, 16 aa, synthetic construct
  REGION 1..16: note = Synthetic polypeptide representing artificial human antibody CDR-H3 region
ARLVTSPEEGGPWFDP

SEQ ID NO: 1654 - protein, 12 aa, synthetic construct
  REGION 1..12: note = Synthetic polypeptide representing artificial human antibody CDR-H3 region
ARDTEVGHHFDY

SEQ ID NO: 1655 - protein, 11 aa, synthetic construct
  REGION 1..11: note = Synthetic polypeptide representing artificial human antibody CDR-H3 region
AKPWRSDGFDV

SEQ ID NO: 1656 - protein, 11 aa, synthetic construct
  REGION 1..11: note = Synthetic polypeptide representing artificial human antibody CDR-H3 region
AVGMVTDGFEI

SEQ ID NO: 1657 - protein, 12 aa, synthetic construct
  REGION 1..12: note = Synthetic polypeptide representing artificial human antibody CDR-H3 region
ARLDLRTVRFDP

SEQ ID NO: 1658 - protein, 14 aa, synthetic construct
  REGION 1..14: note = Synthetic polypeptide representing artificial human antibody CDR-H3 region
ARHSSGPPRLAFDI

SEQ ID NO: 1659 - protein, 13 aa, synthetic construct
  REGION 1..13: note = Synthetic polypeptide representing artificial human antibody CDR-H3 region
AKDFAMPTVTTDY

SEQ ID NO: 1660 - protein, 13 aa, synthetic construct
  REGION 1..13: note = Synthetic polypeptide representing artificial human antibody CDR-H3 region
VHRPSLAYWYFDV

SEQ ID NO: 1661 - protein, 14 aa, synthetic construct
  REGION 1..14: note = Synthetic polypeptide representing artificial human antibody CDR-H3 region
VREGDSRKYYSLDY

SEQ ID NO: 1662 - protein, 13 aa, synthetic construct
  REGION 1..13: note = Synthetic polypeptide representing artificial human antibody CDR-H3 region
ARDPMWVSYAFDI

SEQ ID NO: 1663 - protein, 9 aa, synthetic construct
  REGION 1..9: note = Synthetic polypeptide representing artificial human antibody CDR-H3 region
ASGYVSFDL

SEQ ID NO: 1664 - protein, 16 aa, synthetic construct
  REGION 1..16: note = Synthetic polypeptide representing artificial human antibody CDR-H3 region
AREGAYESSGPDPFDI

SEQ ID NO: 1665 - protein, 15 aa, synthetic construct
  REGION 1..15: note = Synthetic polypeptide representing artificial human antibody CDR-H3 region
ASLFLTYYGSGTYYR

SEQ ID NO: 1666 - protein, 11 aa, synthetic construct
  REGION 1..11: note = Synthetic polypeptide representing artificial human antibody CDR-H3 region
AKSTLGGGFDF

SEQ ID NO: 1667 - protein, 18 aa, synthetic construct
  REGION 1..18: note = Synthetic polypeptide representing artificial human antibody CDR-H3 region
ARVGSSSWYSSGRSPFDY

SEQ ID NO: 1668 - protein, 16 aa, synthetic construct
  REGION 1..16: note = Synthetic polypeptide representing artificial human antibody CDR-H3 region
AKDQIVLEMATSPFDY

SEQ ID NO: 1669 - protein, 17 aa, synthetic construct
  REGION 1..17: note = Synthetic polypeptide representing artificial human antibody CDR-H3 region
ARDLSCSSTSCHDAFDI

SEQ ID NO: 1670 - protein, 16 aa, synthetic construct
  REGION 1..16: note = Synthetic polypeptide representing artificial human antibody CDR-H3 region
ARGPNFHESIRDGFDI

SEQ ID NO: 1671 - protein, 12 aa, synthetic construct
  REGION 1..12: note = Synthetic polypeptide representing artificial human antibody CDR-H3 region
ARVNWNSDTFDS

SEQ ID NO: 1672 - protein, 20 aa, synthetic construct
  REGION 1..20: note = Synthetic polypeptide representing artificial human antibody CDR-H3 region
ARDPGRDPYLDLDYHYGMDV

SEQ ID NO: 1673 - protein, 16 aa, synthetic construct
  REGION 1..16: note = Synthetic polypeptide representing artificial human antibody CDR-H3 region
ARDKRSGMTSDRRIDY

SEQ ID NO: 1674 - protein, 12 aa, synthetic construct
  REGION 1..12: note = Synthetic polypeptide representing artificial human antibody CDR-H3 region
SGGYYSSSHMDV

SEQ ID NO: 1675 - protein, 13 aa, synthetic construct
  REGION 1..13: note = Synthetic polypeptide representing artificial human antibody CDR-H3 region
ARVNIAAAGTLDY

SEQ ID NO: 1676 - protein, 21 aa, synthetic construct
  REGION 1..21: note = Synthetic polypeptide representing artificial human antibody CDR-H3 region
VKDMGPAGTASAYHYHNGMDV

SEQ ID NO: 1677 - protein, 12 aa, synthetic construct
  REGION 1..12: note = Synthetic polypeptide representing artificial human antibody CDR-H3 region
ARLTTSTSALSY

SEQ ID NO: 1678 - protein, 16 aa, synthetic construct
  REGION 1..16: note = Synthetic polypeptide representing artificial human antibody CDR-H3 region
ARENWNSAGTTEWFDP

SEQ ID NO: 1679 - protein, 10 aa, synthetic construct
  REGION 1..10: note = Synthetic polypeptide representing artificial human antibody CDR-H3 region
ARDTLQKGDY

SEQ ID NO: 1680 - protein, 19 aa, synthetic construct
  REGION 1..19: note = Synthetic polypeptide representing artificial human antibody CDR-H3 region
ARASRVLESKSWHGDAFDV

SEQ ID NO: 1681 - protein, 13 aa, synthetic construct
  REGION 1..13: note = Synthetic polypeptide representing artificial human antibody CDR-H3 region
ARGLGGSGYYFDY

SEQ ID NO: 1682 - protein, 17 aa, synthetic construct
  REGION 1..17: note = Synthetic polypeptide representing artificial human antibody CDR-H3 region
ARQAFCGANCWSGAYDI

SEQ ID NO: 1683 - protein, 19 aa, synthetic construct
  REGION 1..19: note = Synthetic polypeptide representing artificial human antibody CDR-H3 region
VRRGATVFQGKIIKGYMDV

SEQ ID NO: 1684 - protein, 10 aa, synthetic construct
  REGION 1..10: note = Synthetic polypeptide representing artificial human antibody CDR-H3 region
AKVKGGSNDY

SEQ ID NO: 1685 - protein, 13 aa, synthetic construct
  REGION 1..13: note = Synthetic polypeptide representing artificial human antibody CDR-H3 region
ARHLYGDFYYLDY

SEQ ID NO: 1686 - protein, 13 aa, synthetic construct
  REGION 1..13: note = Synthetic polypeptide representing artificial human antibody CDR-H3 region
ARDHRTGSYYPDY

SEQ ID NO: 1687 - protein, 15 aa, synthetic construct
  REGION 1..15: note = Synthetic polypeptide representing artificial human antibody CDR-H3 region
ARGVRQQQVRKWFDP

SEQ ID NO: 1688 - protein, 12 aa, synthetic construct
  REGION 1..12: note = Synthetic polypeptide representing artificial human antibody CDR-H3 region
AMDNSGSGGVDY

SEQ ID NO: 1689 - protein, 12 aa, synthetic construct
  REGION 1..12: note = Synthetic polypeptide representing artificial human antibody CDR-H3 region
ARDSYHYYGMDV

SEQ ID NO: 1690 - protein, 16 aa, synthetic construct
  REGION 1..16: note = Synthetic polypeptide representing artificial human antibody CDR-H3 region
ARETVYISTYYYGLDV

SEQ ID NO: 1691 - protein, 13 aa, synthetic construct
  REGION 1..13: note = Synthetic polypeptide representing artificial human antibody CDR-H3 region
ATDGPLHTSGLDY

SEQ ID NO: 1692 - protein, 13 aa, synthetic construct
  REGION 1..13: note = Synthetic polypeptide representing artificial human antibody CDR-H3 region
ACLGAEANDAFDI

SEQ ID NO: 1693 - protein, 7 aa, synthetic construct
  REGION 1..7: note = Synthetic polypeptide representing artificial human antibody CDR-H3 region
AKVPGDY

SEQ ID NO: 1694 - protein, 15 aa, synthetic construct
  REGION 1..15: note = Synthetic polypeptide representing artificial human antibody CDR-H3 region
ARAGLSTSWPSWFDP

SEQ ID NO: 1695 - protein, 14 aa, synthetic construct
  REGION 1..14: note = Synthetic polypeptide representing artificial human antibody CDR-H3 region
ARNDISFKQSAIDV

SEQ ID NO: 1696 - protein, 17 aa, synthetic construct
  REGION 1..17: note = Synthetic polypeptide representing artificial human antibody CDR-H3 region
AKTKTMGVGGEYFGLDV

SEQ ID NO: 1697 - protein, 16 aa, synthetic construct
  REGION 1..16: note = Synthetic polypeptide representing artificial human antibody CDR-H3 region
ARHKALWFGEAGAFDI

SEQ ID NO: 1698 - protein, 18 aa, synthetic construct
  REGION 1..18: note = Synthetic polypeptide representing artificial human antibody CDR-H3 region
AKDLLGFRDQRNYYGMDV

SEQ ID NO: 1699 - protein, 13 aa, synthetic construct
  REGION 1..13: note = Synthetic polypeptide representing artificial human antibody CDR-H3 region
ARSFYDTLFYFEN

SEQ ID NO: 1700 - protein, 12 aa, synthetic construct
  REGION 1..12: note = Synthetic polypeptide representing artificial human antibody CDR-H3 region
ARVYSTKWDFDY

SEQ ID NO: 1701 - protein, 11 aa, synthetic construct
  REGION 1..11: note = Synthetic polypeptide representing artificial human antibody CDR-H3 region
AKGGPLRPFDI

SEQ ID NO: 1702 - protein, 15 aa, synthetic construct
  REGION 1..15: note = Synthetic polypeptide representing artificial human antibody CDR-H3 region
ARLSRDGYTIEHFDY

SEQ ID NO: 1703 - protein, 19 aa, synthetic construct
  REGION 1..19: note = Synthetic polypeptide representing artificial human antibody CDR-H3 region
ARRGVSGGSAWTYYNFFDP

SEQ ID NO: 1704 - protein, 14 aa, synthetic construct
  REGION 1..14: note = Synthetic polypeptide representing artificial human antibody CDR-H3 region
ARELPVIGRRTFDI

SEQ ID NO: 1705 - protein, 22 aa, synthetic construct
  REGION 1..22: note = Synthetic polypeptide representing artificial human antibody CDR-H3 region
ARDSEVEKSDGYMASTAEYFQL

SEQ ID NO: 1706 - protein, 15 aa, synthetic construct
  REGION 1..15: note = Synthetic polypeptide representing artificial human antibody CDR-H3 region
VKAGVPWEVQRWFDP

SEQ ID NO: 1707 - protein, 12 aa, synthetic construct
  REGION 1..12: note = Synthetic polypeptide representing artificial human antibody CDR-H3 region
ARDRQGLGRMDV

SEQ ID NO: 1708 - protein, 12 aa, synthetic construct
  REGION 1..12: note = Synthetic polypeptide representing artificial human antibody CDR-H3 region
ARELGANYYFAY

SEQ ID NO: 1709 - protein, 15 aa, synthetic construct
  REGION 1..15: note = Synthetic polypeptide representing artificial human antibody CDR-H3 region
AREVDIRGDSDAFDI

SEQ ID NO: 1710 - protein, 10 aa, synthetic construct
  REGION 1..10: note = Synthetic polypeptide representing artificial human antibody CDR-H3 region
ATTRNSAFLN

SEQ ID NO: 1711 - protein, 14 aa, synthetic construct
  REGION 1..14: note = Synthetic polypeptide representing artificial human antibody CDR-H3 region
AKSAFGGVPDGFDI

SEQ ID NO: 1712 - protein, 7 aa, synthetic construct
  REGION 1..7: note = Synthetic polypeptide representing artificial human antibody CDR-H3 region
ARDGFDY

SEQ ID NO: 1713 - protein, 13 aa, synthetic construct
  REGION 1..13: note = Synthetic polypeptide representing artificial human antibody CDR-H3 region
AKAGYSFTTAPDY

SEQ ID NO: 1714 - protein, 14 aa, synthetic construct
  REGION 1..14: note = Synthetic polypeptide representing artificial human antibody CDR-H3 region
ARERGQVRSYGMDV

SEQ ID NO: 1715 - protein, 19 aa, synthetic construct
  REGION 1..19: note = Synthetic polypeptide representing artificial human antibody CDR-H3 region
VKIGGDGTAYAWTFRHFDS

SEQ ID NO: 1716 - protein, 13 aa, synthetic construct
  REGION 1..13: note = Synthetic polypeptide representing artificial human antibody CDR-H3 region
ARGLGGDWNYLAY

SEQ ID NO: 1717 - protein, 21 aa, synthetic construct
  REGION 1..21: note = Synthetic polypeptide representing artificial human antibody CDR-H3 region
AKEGGWGNTVTTSYYYYGMDV

SEQ ID NO: 1718 - protein, 14 aa, synthetic construct
  REGION 1..14: note = Synthetic polypeptide representing artificial human antibody CDR-H3 region
TRDGGYFATGEFDY

SEQ ID NO: 1719 - protein, 12 aa, synthetic construct
  REGION 1..12: note = Synthetic polypeptide representing artificial human antibody CDR-H3 region
ARERFGQGALDY

SEQ ID NO: 1720 - protein, 15 aa, synthetic construct
  REGION 1..15: note = Synthetic polypeptide representing artificial human antibody CDR-H3 region
ATIVAAYSYGFEFDP

SEQ ID NO: 1721 - protein, 21 aa, synthetic construct
  REGION 1..21: note = Synthetic polypeptide representing artificial human antibody CDR-H3 region
AKEGGWGNTVTTSYYYYGMDV

SEQ ID NO: 1722 - protein, 15 aa, synthetic construct
  REGION 1..15: note = Synthetic polypeptide representing artificial human antibody CDR-H3 region
ARQGFEALVIRGFDY

SEQ ID NO: 1723 - protein, 15 aa, synthetic construct
  REGION 1..15: note = Synthetic polypeptide representing artificial human antibody CDR-H3 region
ARRSTSSPSFSTLDV

SEQ ID NO: 1724 - protein, 10 aa, synthetic construct
  REGION 1..10: note = Synthetic polypeptide representing artificial human antibody CDR-H3 region
ARQMVTTRGY

SEQ ID NO: 1725 - protein, 16 aa, synthetic construct
  REGION 1..16: note = Synthetic polypeptide representing artificial human antibody CDR-H3 region
ARVPSRYGRSRGAFDI

SEQ ID NO: 1726 - protein, 12 aa, synthetic construct
  REGION 1..12: note = Synthetic polypeptide representing artificial human antibody CDR-H3 region
ARNLYRLGWFDP

SEQ ID NO: 1727 - protein, 13 aa, synthetic construct
  REGION 1..13: note = Synthetic polypeptide representing artificial human antibody CDR-H3 region
AKSKGNYRDAMDV

SEQ ID NO: 1728 - protein, 14 aa, synthetic construct
  REGION 1..14: note = Synthetic polypeptide representing artificial human antibody CDR-H3 region
ATSYTVTTFYGMDV

SEQ ID NO: 1729 - protein, 12 aa, synthetic construct
  REGION 1..12: note = Synthetic polypeptide representing artificial human antibody CDR-H3 region
ARGAAFYYGMDV

SEQ ID NO: 1730 - protein, 15 aa, synthetic construct
  REGION 1..15: note = Synthetic polypeptide representing artificial human antibody CDR-H3 region
ARDTYGDPRGDYFDY

SEQ ID NO: 1731 - protein, 17 aa, synthetic construct
  REGION 1..17: note = Synthetic polypeptide representing artificial human antibody CDR-H3 region
ARLWGSGDWWPSLYFDS

SEQ ID NO: 1732 - protein, 13 aa, synthetic construct
  REGION 1..13: note = Synthetic polypeptide representing artificial human antibody CDR-H3 region
ARIRRIAATSFDY

SEQ ID NO: 1733 - protein, 16 aa, synthetic construct
  REGION 1..16: note = Synthetic polypeptide representing artificial human antibody CDR-H3 region
AKIARRPPSFYDYMDV

SEQ ID NO: 1734 - protein, 16 aa, synthetic construct
  REGION 1..16: note = Synthetic polypeptide representing artificial human antibody CDR-H3 region
ARSTSSSTSDFHYMDV

SEQ ID NO: 1735 - protein, 10 aa, synthetic construct
  REGION 1..10: note = Synthetic polypeptide representing artificial human antibody CDR-H3 region
TRGWAFTSSD

SEQ ID NO: 1736 - protein, 8 aa, synthetic construct
  REGION 1..8: note = Synthetic polypeptide representing artificial human antibody CDR-H3 region
AGGWALGY

SEQ ID NO: 1737 - protein, 10 aa, synthetic construct
  REGION 1..10: note = Synthetic polypeptide representing artificial human antibody CDR-H3 region
ARHRIFGLDV

SEQ ID NO: 1738 - protein, 19 aa, synthetic construct
  REGION 1..19: note = Synthetic polypeptide representing artificial human antibody CDR-H3 region
ARRGPTDTWSGEVGYYFDY

SEQ ID NO: 1739 - protein, 16 aa, synthetic construct
  REGION 1..16: note = Synthetic polypeptide representing artificial human antibody CDR-H3 region
ARDGKTLGYGGNSVDY

SEQ ID NO: 1740 - protein, 15 aa, synthetic construct
  REGION 1..15: note = Synthetic polypeptide representing artificial human antibody CDR-H3 region
ARTETKWEDRGLWDY

SEQ ID NO: 1741 - protein, 10 aa, synthetic construct
  REGION 1..10: note = Synthetic polypeptide representing artificial human antibody CDR-H3 region
ARSFYGSGLQ

SEQ ID NO: 1742 - protein, 13 aa, synthetic construct
  REGION 1..13: note = Synthetic polypeptide representing artificial human antibody CDR-H3 region
ARAMGGYTYYLDD

SEQ ID NO: 1743 - protein, 17 aa, synthetic construct
  REGION 1..17: note = Synthetic polypeptide representing artificial human antibody CDR-H3 region
ARAGKDGYNFFYYGMDV

SEQ ID NO: 1744 - protein, 15 aa, synthetic construct
  REGION 1..15: note = Synthetic polypeptide representing artificial human antibody CDR-H3 region
ARGIMTTAISYYFDY

SEQ ID NO: 1745 - protein, 18 aa, synthetic construct
  REGION 1..18: note = Synthetic polypeptide representing artificial human antibody CDR-H3 region
AKGERDLTDYGDPEYFQH

SEQ ID NO: 1746 - protein, 18 aa, synthetic construct
  REGION 1..18: note = Synthetic polypeptide representing artificial human antibody CDR-H3 region
AKDLRYCSARSSCFGIDF

SEQ ID NO: 1747 - protein, 9 aa, synthetic construct
  REGION 1..9: note = Synthetic polypeptide representing artificial human antibody CDR-H3 region
ARRAYSFDY

SEQ ID NO: 1748 - protein, 18 aa, synthetic construct
  REGION 1..18: note = Synthetic polypeptide representing artificial human antibody CDR-H3 region
AREGAPDDYGDSGTAFDI

SEQ ID NO: 1749 - protein, 12 aa, synthetic construct
  REGION 1..12: note = Synthetic polypeptide representing artificial human antibody CDR-H3 region
TTDHPYGDYSDN

SEQ ID NO: 1750 - protein, 10 aa, synthetic construct
  REGION 1..10: note = Synthetic polypeptide representing artificial human antibody CDR-H3 region
AKELLGGFDY

SEQ ID NO: 1751 - protein, 13 aa, synthetic construct
  REGION 1..13: note = Synthetic polypeptide representing artificial human antibody CDR-H3 region
ARVFGSAAGAFDI

SEQ ID NO: 1752 - protein, 12 aa, synthetic construct
  REGION 1..12: note = Synthetic polypeptide representing artificial human antibody CDR-H3 region
ARHDWRLYAFDY

SEQ ID NO: 1753 - protein, 9 aa, synthetic construct
  REGION 1..9: note = Synthetic polypeptide representing artificial human antibody CDR-H3 region
AGGETSPDY

SEQ ID NO: 1754 - protein, 15 aa, synthetic construct
  REGION 1..15: note = Synthetic polypeptide representing artificial human antibody CDR-H3 region
VSRGPLGGAAAGPDY

SEQ ID NO: 1755 - protein, 10 aa, synthetic construct
  REGION 1..10: note = Synthetic polypeptide representing artificial human antibody CDR-H3 region
ARDVRGWFVP

SEQ ID NO: 1756 - protein, 19 aa, synthetic construct
  REGION 1..19: note = Synthetic polypeptide representing artificial human antibody CDR-H3 region
VRDRNIVSVPGAIPYGMDV

SEQ ID NO: 1757 - protein, 9 aa, synthetic construct
  REGION 1..9: note = Synthetic polypeptide representing artificial human antibody CDR-H3 region
ARGSDTLDY

SEQ ID NO: 1758 - protein, 12 aa, synthetic construct
  REGION 1..12: note = Synthetic polypeptide representing artificial human antibody CDR-H3 region
ARVGLTFALFDP

SEQ ID NO: 1759 - protein, 17 aa, synthetic construct
  REGION 1..17: note = Synthetic polypeptide representing artificial human antibody CDR-H3 region
ANSAGIQLWSSDNWFDP

SEQ ID NO: 1760 - protein, 10 aa, synthetic construct
  REGION 1..10: note = Synthetic polypeptide representing artificial human antibody CDR-H3 region
AKEGIELMIL

SEQ ID NO: 1761 - protein, 14 aa, synthetic construct
  REGION 1..14: note = Synthetic polypeptide representing artificial human antibody CDR-H3 region
ARGITLTRGVSFDY

SEQ ID NO: 1762 - protein, 9 aa, synthetic construct
  REGION 1..9: note = Synthetic polypeptide representing artificial human antibody CDR-H3 region
ARDGGAFDI

SEQ ID NO: 1763 - protein, 16 aa, synthetic construct
  REGION 1..16: note = Synthetic polypeptide representing artificial human antibody CDR-H3 region
ARDRLFTAINSGYFDY

SEQ ID NO: 1764 - protein, 11 aa, synthetic construct
  REGION 1..11: note = Synthetic polypeptide representing artificial human antibody CDR-H3 region
AREGSYYGIGY

SEQ ID NO: 1765 - protein, 14 aa, synthetic construct
  REGION 1..14: note = Synthetic polypeptide representing artificial human antibody CDR-H3 region
ARDTDSGWLDSFDY

SEQ ID NO: 1766 - protein, 21 aa, synthetic construct
  REGION 1..21: note = Synthetic polypeptide representing artificial human antibody CDR-H3 region
ATDQGCDDGSCYVGHYYGMDV

SEQ ID NO: 1767 - protein, 10 aa, synthetic construct
  REGION 1..10: note = Synthetic polypeptide representing artificial human antibody CDR-H3 region
GRIMTPSIDL

SEQ ID NO: 1768 - protein, 13 aa, synthetic construct
  REGION 1..13: note = Synthetic polypeptide representing artificial human antibody CDR-H3 region
AREGRGGGDFFDY

SEQ ID NO: 1769 - protein, 15 aa, synthetic construct
  REGION 1..15: note = Synthetic polypeptide representing artificial human antibody CDR-H3 region
AKDGDSLGDFSTFDI

SEQ ID NO: 1770 - protein, 12 aa, synthetic construct
  REGION 1..12: note = Synthetic polypeptide representing artificial human antibody CDR-H3 region
ARDGYDFRAFDH

SEQ ID NO: 1771 - protein, 20 aa, synthetic construct
  REGION 1..20: note = Synthetic polypeptide representing artificial human antibody CDR-H3 region
ARARGGGFCSNMDCPAMFDY

SEQ ID NO: 1772 - protein, 9 aa, synthetic construct
  REGION 1..9: note = Synthetic polypeptide representing artificial human antibody CDR-H3 region
TTIHDYGDH

SEQ ID NO: 1773 - protein, 10 aa, synthetic construct
  REGION 1..10: note = Synthetic polypeptide representing artificial human antibody CDR-H3 region
ARGLLRSLDV

SEQ ID NO: 1774 - protein, 14 aa, synthetic construct
  REGION 1..14: note = Synthetic polypeptide representing artificial human antibody CDR-H3 region
ARVKLGASSRVFDV

SEQ ID NO: 1775 - protein, 13 aa, synthetic construct
  REGION 1..13: note = Synthetic polypeptide representing artificial human antibody CDR-H3 region
ATTVTPKVTSFAS

SEQ ID NO: 1776 - protein, 15 aa, synthetic construct
  REGION 1..15: note = Synthetic polypeptide representing artificial human antibody CDR-H3 region
AREQSPLYFGPSLDV

SEQ ID NO: 1777 - protein, 12 aa, synthetic construct
  REGION 1..12: note = Synthetic polypeptide representing artificial human antibody CDR-H3 region
AREPYSSYAMDV

SEQ ID NO: 1778 - protein, 12 aa, synthetic construct
  REGION 1..12: note = Synthetic polypeptide representing artificial human antibody CDR-H3 region
AKDGSEMLLCDY

SEQ ID NO: 1779 - protein, 11 aa, synthetic construct
  REGION 1..11: note = Synthetic polypeptide representing artificial human antibody CDR-H3 region
ARDTRWRGLDS

SEQ ID NO: 1780 - protein, 13 aa, synthetic construct
  REGION 1..13: note = Synthetic polypeptide representing artificial human antibody CDR-H3 region
AKDLLAVPGLLDD

SEQ ID NO: 1781 - protein, 14 aa, synthetic construct
  REGION 1..14: note = Synthetic polypeptide representing artificial human antibody CDR-H3 region
ASRGGSSRRYGMGV

SEQ ID NO: 1782 - protein, 16 aa, synthetic construct
  REGION 1..16: note = Synthetic polypeptide representing artificial human antibody CDR-H3 region
VKLKGIGAMWTYAMDV

SEQ ID NO: 1783 - protein, 18 aa, synthetic construct
  REGION 1..18: note = Synthetic polypeptide representing artificial human antibody CDR-H3 region
ARDQGYGDYDYPRDWIEP

SEQ ID NO: 1784 - protein, 16 aa, synthetic construct
  REGION 1..16: note = Synthetic polypeptide representing artificial human antibody CDR-H3 region
ASVRDLVSGTTYYYHY

SEQ ID NO: 1785 - protein, 10 aa, synthetic construct
  REGION 1..10: note = Synthetic polypeptide representing artificial human antibody CDR-H3 region
ARYGDYSFDP

SEQ ID NO: 1786 - protein, 13 aa, synthetic construct
  REGION 1..13: note = Synthetic polypeptide representing artificial human antibody CDR-H3 region
ARVVDTVLADFDY

SEQ ID NO: 1787 - protein, 14 aa, synthetic construct
  REGION 1..14: note = Synthetic polypeptide representing artificial human antibody CDR-H3 region
ARSGGFGWSRDLDY

SEQ ID NO: 1788 - protein, 16 aa, synthetic construct
  REGION 1..16: note = Synthetic polypeptide representing artificial human antibody CDR-H3 region
ARHGFWSGPIPDAFDI

SEQ ID NO: 1789 - protein, 12 aa, synthetic construct
  REGION 1..12: note = Synthetic polypeptide representing artificial human antibody CDR-H3 region
AHEDYGSGNGNY

SEQ ID NO: 1790 - protein, 15 aa, synthetic construct
  REGION 1..15: note = Synthetic polypeptide representing artificial human antibody CDR-H3 region
ARDRDSGYERNCLDP

SEQ ID NO: 1791 - protein, 22 aa, synthetic construct
  REGION 1..22: note = Synthetic polypeptide representing artificial human antibody CDR-H3 region
ARGAPYGSRIYYDYDSYHGMDV

SEQ ID NO: 1792 - protein, 16 aa, synthetic construct
  REGION 1..16: note = Synthetic polypeptide representing artificial human antibody CDR-H3 region
ARGKFDWFPRVSSFDY

SEQ ID NO: 1793 - protein, 13 aa, synthetic construct
  REGION 1..13: note = Synthetic polypeptide representing artificial human antibody CDR-H3 region
AAAYYIDTSGFDY

SEQ ID NO: 1794 - protein, 18 aa, synthetic construct
  REGION 1..18: note = Synthetic polypeptide representing artificial human antibody CDR-H3 region
AKGRTYSNNWLFHWYFDL

SEQ ID NO: 1795 - protein, 13 aa, synthetic construct
  REGION 1..13: note = Synthetic polypeptide representing artificial human antibody CDR-H3 region
ARVFSTIFHGVDP

SEQ ID NO: 1796 - protein, 15 aa, synthetic construct
  REGION 1..15: note = Synthetic polypeptide representing artificial human antibody CDR-H3 region
ARHLSSGEYHYGLDV

SEQ ID NO: 1797 - protein, 13 aa, synthetic construct
  REGION 1..13: note = Synthetic polypeptide representing artificial human antibody CDR-H3 region
AKGKGIVGATFDY

SEQ ID NO: 1798 - protein, 18 aa, synthetic construct
  REGION 1..18: note = Synthetic polypeptide representing artificial human antibody CDR-H3 region
ARDALDFDWLLSAGGFDY

SEQ ID NO: 1799 - protein, 11 aa, synthetic construct
  REGION 1..11: note = Synthetic polypeptide representing artificial human antibody CDR-H3 region
ARLLVGGAFDI

SEQ ID NO: 1800 - protein, 18 aa, synthetic construct
  REGION 1..18: note = Synthetic polypeptide representing artificial human antibody CDR-H3 region
TPGSCSGGSCYSGDAFDI

SEQ ID NO: 1801 - protein, 15 aa, synthetic construct
  REGION 1..15: note = Synthetic polypeptide representing artificial human antibody CDR-H3 region
ARESLDSASYSTIAH

SEQ ID NO: 1802 - protein, 15 aa, synthetic construct
  REGION 1..15: note = Synthetic polypeptide representing artificial human antibody CDR-H3 region
ARDRGGNSWLDVFDM

SEQ ID NO: 1803 - protein, 15 aa, synthetic construct
  REGION 1..15: note = Synthetic polypeptide representing artificial human antibody CDR-H3 region
ARSPAAFGSESYFDS

SEQ ID NO: 1804 - protein, 17 aa, synthetic construct
  REGION 1..17: note = Synthetic polypeptide representing artificial human antibody CDR-H3 region
AKDLLEDPYFGDLLFDY

SEQ ID NO: 1805 - protein, 12 aa, synthetic construct
  REGION 1..12: note = Synthetic polypeptide representing artificial human antibody CDR-H3 region
VRTPAVGTDPDY

SEQ ID NO: 1806 - protein, 12 aa, synthetic construct
  REGION 1..12: note = Synthetic polypeptide representing artificial human antibody CDR-H3 region
SSGGSTSMVGRY

SEQ ID NO: 1807 - protein, 14 aa, synthetic construct
  REGION 1..14: note = Synthetic polypeptide representing artificial human antibody CDR-H3 region
ARMTPFKFGLCPDY

SEQ ID NO: 1808 - protein, 14 aa, synthetic construct
  REGION 1..14: note = Synthetic polypeptide representing artificial human antibody CDR-H3 region
ARVVVVGTDYGMDV

SEQ ID NO: 1809 - protein, 14 aa, synthetic construct
  REGION 1..14: note = Synthetic polypeptide representing artificial human antibody CDR-H3 region
ARDQGLERANWFDP

SEQ ID NO: 1810 - protein, 9 aa, synthetic construct
  REGION 1..9: note = Synthetic polypeptide representing artificial human antibody CDR-H3 region
ARGVRHFDY

SEQ ID NO: 1811 - protein, 12 aa, synthetic construct
  REGION 1..12: note = Synthetic polypeptide representing artificial human antibody CDR-H3 region
ARESPLTVVFDY

SEQ ID NO: 1812 - protein, 11 aa, synthetic construct
  REGION 1..11: note = Synthetic polypeptide representing artificial human antibody CDR-H3 region
ARESSAAGYDY

SEQ ID NO: 1813 - protein, 16 aa, synthetic construct
  REGION 1..16: note = Synthetic polypeptide representing artificial human antibody CDR-H3 region
ARKLMSGIVSRGWFDP

SEQ ID NO: 1814 - protein, 14 aa, synthetic construct
  REGION 1..14: note = Synthetic polypeptide representing artificial human antibody CDR-H3 region
ARDRGDYVTHWFDP

SEQ ID NO: 1815 - protein, 13 aa, synthetic construct
  REGION 1..13: note = Synthetic polypeptide representing artificial human antibody CDR-H3 region
ARHRVGDSPGLHY

SEQ ID NO: 1816 - protein, 12 aa, synthetic construct
  REGION 1..12: note = Synthetic polypeptide representing artificial human antibody CDR-H3 region
ASPIAVAAPFAY

SEQ ID NO: 1817 - protein, 17 aa, synthetic construct
  REGION 1..17: note = Synthetic polypeptide representing artificial human antibody CDR-H3 region
VKDYLAVGGTYYDYFDY

SEQ ID NO: 1818 - protein, 11 aa, synthetic construct
  REGION 1..11: note = Synthetic polypeptide representing artificial human antibody CDR-H3 region
ARHDYRNYFDY

SEQ ID NO: 1819 - protein, 15 aa, synthetic construct
  REGION 1..15: note = Synthetic polypeptide representing artificial human antibody CDR-H3 region
ATPPSRYGGNYYADY

SEQ ID NO: 1820 - protein, 11 aa, synthetic construct
  REGION 1..11: note = Synthetic polypeptide representing artificial human antibody CDR-H3 region
ARQGPTVAIDF

SEQ ID NO: 1821 - protein, 9 aa, synthetic construct
  REGION 1..9: note = Synthetic polypeptide representing artificial human antibody CDR-H3 region
ARRGREFDY

SEQ ID NO: 1822 - protein, 17 aa, synthetic construct
  REGION 1..17: note = Synthetic polypeptide representing artificial human antibody CDR-H3 region
AIQEKRELQLRRELDNY

SEQ ID NO: 1823 - protein, 10 aa, synthetic construct
  REGION 1..10: note = Synthetic polypeptide representing artificial human antibody CDR-H3 region
ARVFRYGMDV

SEQ ID NO: 1824 - protein, 10 aa, synthetic construct
  REGION 1..10: note = Synthetic polypeptide representing artificial human antibody CDR-H3 region
AIKEGYGLSD

SEQ ID NO: 1825 - protein, 12 aa, synthetic construct
  REGION 1..12: note = Synthetic polypeptide representing artificial human antibody CDR-H3 region
AKEDGYTQNFDY

SEQ ID NO: 1826 - protein, 14 aa, synthetic construct
  REGION 1..14: note = Synthetic polypeptide representing artificial human antibody CDR-H3 region
ARVLDFYGSSVLDY

SEQ ID NO: 1827 - protein, 8 aa, synthetic construct
  REGION 1..8: note = Synthetic polypeptide representing artificial human antibody CDR-H3 region
ARDRPGDY

SEQ ID NO: 1828 - protein, 11 aa, synthetic construct
  REGION 1..11: note = Synthetic polypeptide representing artificial human antibody CDR-H3 region
ARDLGVGSTTY

SEQ ID NO: 1829 - protein, 14 aa, synthetic construct
  REGION 1..14: note = Synthetic polypeptide representing artificial human antibody CDR-H3 region
VKDLEVSIGHNFDF

SEQ ID NO: 1830 - protein, 20 aa, synthetic construct
  REGION 1..20: note = Synthetic polypeptide representing artificial human antibody CDR-H3 region
ARDRGVVVVAATPYYYGMDV

SEQ ID NO: 1831 - protein, 17 aa, synthetic construct
  REGION 1..17: note = Synthetic polypeptide representing artificial human antibody CDR-H3 region
VHARDDYGDSAWSTGPV

SEQ ID NO: 1832 - protein, 17 aa, synthetic construct
  REGION 1..17: note = Synthetic polypeptide representing artificial human antibody CDR-H3 region
GHRRLLRGVTTTVYFDP

SEQ ID NO: 1833 - protein, 17 aa, synthetic construct
  REGION 1..17: note = Synthetic polypeptide representing artificial human antibody CDR-H3 region
ARGGELLGGFGYSGMDV

SEQ ID NO: 1834 - protein, 19 aa, synthetic construct
  REGION 1..19: note = Synthetic polypeptide representing artificial human antibody CDR-H3 region
AHYYYDSSGYYQNAEYFQY

SEQ ID NO: 1835 - protein, 21 aa, synthetic construct
  REGION 1..21: note = Synthetic polypeptide representing artificial human antibody CDR-H3 region
ARTQWGTDVEATNPYYYFMDV

SEQ ID NO: 1836 - protein, 12 aa, synthetic construct
  REGION 1..12: note = Synthetic polypeptide representing artificial human antibody CDR-H3 region
ARDQSGADRFDS

SEQ ID NO: 1837 - protein, 13 aa, synthetic construct
  REGION 1..13: note = Synthetic polypeptide representing artificial human antibody CDR-H3 region
ARSSKWTDWHFDY

SEQ ID NO: 1838 - protein, 14 aa, synthetic construct
  REGION 1..14: note = Synthetic polypeptide representing artificial human antibody CDR-H3 region
ARDLDEINSSWLDP

SEQ ID NO: 1839 - protein, 17 aa, synthetic construct
  REGION 1..17: note = Synthetic polypeptide representing artificial human antibody CDR-H3 region
AKRPTAGNSYGGYYFDH

SEQ ID NO: 1840 - protein, 19 aa, synthetic construct
  REGION 1..19: note = Synthetic polypeptide representing artificial human antibody CDR-H3 region
ARRGEVGTMVRVFRKPFDY

SEQ ID NO: 1841 - protein, 18 aa, synthetic construct
  REGION 1..18: note = Synthetic polypeptide representing artificial human antibody CDR-H3 region
ATTSTMPMPTRGRDWFDP

SEQ ID NO: 1842 - protein, 11 aa, synthetic construct
  REGION 1..11: note = Synthetic polypeptide representing artificial human antibody CDR-H3 region
AGAHGDYGLDY

SEQ ID NO: 1843 - protein, 15 aa, synthetic construct
  REGION 1..15: note = Synthetic polypeptide representing artificial human antibody CDR-H3 region
ARHQQKYSPISPLDY

SEQ ID NO: 1844 - protein, 13 aa, synthetic construct
  REGION 1..13: note = Synthetic polypeptide representing artificial human antibody CDR-H3 region
AKDARLAYYGMDV

SEQ ID NO: 1845 - protein, 12 aa, synthetic construct
  REGION 1..12: note = Synthetic polypeptide representing artificial human antibody CDR-H3 region
ARHSSGYSELAY

SEQ ID NO: 1846 - protein, 14 aa, synthetic construct
  REGION 1..14: note = Synthetic polypeptide representing artificial human antibody CDR-H3 region
ARVHNWDFYYGMDV

SEQ ID NO: 1847 - protein, 15 aa, synthetic construct
  REGION 1..15: note = Synthetic polypeptide representing artificial human antibody CDR-H3 region
TRERPPNCGSSCPET

SEQ ID NO: 1848 - protein, 12 aa, synthetic construct
  REGION 1..12: note = Synthetic polypeptide representing artificial human antibody CDR-H3 region
ARVGTSHWYSDS

SEQ ID NO: 1849 - protein, 10 aa, synthetic construct
  REGION 1..10: note = Synthetic polypeptide representing artificial human antibody CDR-H3 region
ARDEGRREGA

SEQ ID NO: 1850 - protein, 13 aa, synthetic construct
  REGION 1..13: note = Synthetic polypeptide representing artificial human antibody CDR-H3 region
ARDIALGRGGMDV

SEQ ID NO: 1851 - protein, 12 aa, synthetic construct
  REGION 1..12: note = Synthetic polypeptide representing artificial human antibody CDR-H3 region
ARHRTGQYYYNS

SEQ ID NO: 1852 - protein, 11 aa, synthetic construct
  REGION 1..11: note = Synthetic polypeptide representing artificial human antibody CDR-H3 region
AASGYGDHVAY

SEQ ID NO: 1853 - protein, 16 aa, synthetic construct
  REGION 1..16: note = Synthetic polypeptide representing artificial human antibody CDR-H3 region
ARGNGPKSGKYSDFDY

SEQ ID NO: 1854 - protein, 10 aa, synthetic construct
  REGION 1..10: note = Synthetic polypeptide representing artificial human antibody CDR-H3 region
ARDKSWYFDY

SEQ ID NO: 1855 - protein, 15 aa, synthetic construct
  REGION 1..15: note = Synthetic polypeptide representing artificial human antibody CDR-H3 region
ARSTASSGYYDAFDI

SEQ ID NO: 1856 - protein, 22 aa, synthetic construct
  REGION 1..22: note = Synthetic polypeptide representing artificial human antibody CDR-H3 region
ARDRREYSSSSRPSYHYYYMDV

SEQ ID NO: 1857 - protein, 13 aa, synthetic construct
  REGION 1..13: note = Synthetic polypeptide representing artificial human antibody CDR-H3 region
ASRYRSPSGAFDI

SEQ ID NO: 1858 - protein, 8 aa, synthetic construct
  REGION 1..8: note = Synthetic polypeptide representing artificial human antibody CDR-H3 region
TRGAVADY

SEQ ID NO: 1859 - protein, 14 aa, synthetic construct
  REGION 1..14: note = Synthetic polypeptide representing artificial human antibody CDR-H3 region
ATSHGGLVPGGENY

SEQ ID NO: 1860 - protein, 16 aa, synthetic construct
  REGION 1..16: note = Synthetic polypeptide representing artificial human antibody CDR-H3 region
VREEFGVVRGPNPFDV

SEQ ID NO: 1861 - protein, 19 aa, synthetic construct
  REGION 1..19: note = Synthetic polypeptide representing artificial human antibody CDR-H3 region
AKTRSYSSADTTRPNAPGY

SEQ ID NO: 1862 - protein, 15 aa, synthetic construct
  REGION 1..15: note = Synthetic polypeptide representing artificial human antibody CDR-H3 region
AKDGQTGTTTPYFDY

SEQ ID NO: 1863 - protein, 10 aa, synthetic construct
  REGION 1..10: note = Synthetic polypeptide representing artificial human antibody CDR-H3 region
ARAGAEGVDY

SEQ ID NO: 1864 - protein, 14 aa, synthetic construct
  REGION 1..14: note = Synthetic polypeptide representing artificial human antibody CDR-H3 region
ARRSDKAVPGTFDQ

SEQ ID NO: 1865 - protein, 15 aa, synthetic construct
  REGION 1..15: note = Synthetic polypeptide representing artificial human antibody CDR-H3 region
AHRGGKNPRYWYFDL

SEQ ID NO: 1866 - protein, 13 aa, synthetic construct
  REGION 1..13: note = Synthetic polypeptide representing artificial human antibody CDR-H3 region
ARGEGGELWAFDY

SEQ ID NO: 1867 - protein, 14 aa, synthetic construct
  REGION 1..14: note = Synthetic polypeptide representing artificial human antibody CDR-H3 region
AREGLRLARGWFHP

SEQ ID NO: 1868 - protein, 12 aa, synthetic construct
  REGION 1..12: note = Synthetic polypeptide representing artificial human antibody CDR-H3 region
ARDFDDGYDIRY

SEQ ID NO: 1869 - protein, 13 aa, synthetic construct
  REGION 1..13: note = Synthetic polypeptide representing artificial human antibody CDR-H3 region
VKSPVAANDAFDI

SEQ ID NO: 1870 - protein, 13 aa, synthetic construct
  REGION 1..13: note = Synthetic polypeptide representing artificial human antibody CDR-H3 region
ARVSVAAPTCLDY

SEQ ID NO: 1871 - protein, 15 aa, synthetic construct
  REGION 1..15: note = Synthetic polypeptide representing artificial human antibody CDR-H3 region
ARHSGHDQLPLDFDN

SEQ ID NO: 1872 - protein, 9 aa, synthetic construct
  REGION 1..9: note = Synthetic polypeptide representing artificial human antibody CDR-H3 region
AGGGSQVDF

SEQ ID NO: 1873 - protein, 17 aa, synthetic construct
  REGION 1..17: note = Synthetic polypeptide representing artificial human antibody CDR-H3 region
AHRFGRGVSYYYYGMDV

SEQ ID NO: 1874 - protein, 12 aa, synthetic construct
  REGION 1..12: note = Synthetic polypeptide representing artificial human antibody CDR-H3 region
AKDSGSNDDMDV

SEQ ID NO: 1875 - protein, 13 aa, synthetic construct
  REGION 1..13: note = Synthetic polypeptide representing artificial human antibody CDR-H3 region
ARRGFYYYYGMDV

SEQ ID NO: 1876 - protein, 10 aa, synthetic construct
  REGION 1..10: note = Synthetic polypeptide representing artificial human antibody CDR-H3 region
ASLLGGDPDY

SEQ ID NO: 1877 - protein, 20 aa, synthetic construct
  REGION 1..20: note = Synthetic polypeptide representing artificial human antibody CDR-H3 region
ARMQIVATTQTYYYYYGMDV

SEQ ID NO: 1878 - protein, 13 aa, synthetic construct
  REGION 1..13: note = Synthetic polypeptide representing artificial human antibody CDR-H3 region
ARAGYDLFGWFDP

SEQ ID NO: 1879 - protein, 19 aa, synthetic construct
  REGION 1..19: note = Synthetic polypeptide representing artificial human antibody CDR-H3 region
AKPNSPFTGSGSFHNYFDY

SEQ ID NO: 1880 - protein, 6 aa, synthetic construct
  REGION 1..6: note = Synthetic polypeptide representing artificial human antibody CDR-H3 region
ASPVRP

SEQ ID NO: 1881 - protein, 21 aa, synthetic construct
  REGION 1..21: note = Synthetic polypeptide representing artificial human antibody CDR-H3 region
ARGFCDLPACYPVPQYNWFDP

SEQ ID NO: 1882 - protein, 13 aa, synthetic construct
  REGION 1..13: note = Synthetic polypeptide representing artificial human antibody CDR-H3 region
ARYSGSYPLGFDY

SEQ ID NO: 1883 - protein, 9 aa, synthetic construct
  REGION 1..9: note = Synthetic polypeptide representing artificial human antibody CDR-H3 region
ARHEGAFDI

SEQ ID NO: 1884 - protein, 12 aa, synthetic construct
  REGION 1..12: note = Synthetic polypeptide representing artificial human antibody CDR-H3 region
TTDLAVTTRFDY

SEQ ID NO: 1885 - protein, 11 aa, synthetic construct
  REGION 1..11: note = Synthetic polypeptide representing artificial human antibody CDR-H3 region
ARSTRTDALDV

SEQ ID NO: 1886 - protein, 13 aa, synthetic construct
  REGION 1..13: note = Synthetic polypeptide representing artificial human antibody CDR-H3 region
AKNDEMDFKGYDY

SEQ ID NO: 1887 - protein, 9 aa, synthetic construct
  REGION 1..9: note = Synthetic polypeptide representing artificial human antibody CDR-H3 region
ARGELLFDH

SEQ ID NO: 1888 - protein, 10 aa, synthetic construct
  REGION 1..10: note = Synthetic polypeptide representing artificial human antibody CDR-H3 region
ARESTVVLDF

SEQ ID NO: 1889 - protein, 12 aa, synthetic construct
  REGION 1..12: note = Synthetic polypeptide representing artificial human antibody CDR-H3 region
AKRSTAVGDFDP

SEQ ID NO: 1890 - protein, 16 aa, synthetic construct
  REGION 1..16: note = Synthetic polypeptide representing artificial human antibody CDR-H3 region
ARGPSNWNGGPEHMDV

SEQ ID NO: 1891 - protein, 6 aa, synthetic construct
  REGION 1..6: note = Synthetic polypeptide representing artificial human antibody CDR-H3 region
ARDFDY

SEQ ID NO: 1892 - protein, 14 aa, synthetic construct
  REGION 1..14: note = Synthetic polypeptide representing artificial human antibody CDR-H3 region
ARDPYGSGTVWFDP

SEQ ID NO: 1893 - protein, 20 aa, synthetic construct
  REGION 1..20: note = Synthetic polypeptide representing artificial human antibody CDR-H3 region
AKTEYTFLSGSDYYQYGMDV

SEQ ID NO: 1894 - protein, 16 aa, synthetic construct
  REGION 1..16: note = Synthetic polypeptide representing artificial human antibody CDR-H3 region
ARRGLLRGSNEGRFDY

SEQ ID NO: 1895 - protein, 15 aa, synthetic construct
  REGION 1..15: note = Synthetic polypeptide representing artificial human antibody CDR-H3 region
TRRGSAWTDPYYTDV

SEQ ID NO: 1896 - protein, 11 aa, synthetic construct
  REGION 1..11: note = Synthetic polypeptide representing artificial human antibody CDR-H3 region
ARDDVPRGYDY

SEQ ID NO: 1897 - protein, 13 aa, synthetic construct
  REGION 1..13: note = Synthetic polypeptide representing artificial human antibody CDR-H3 region
AREYIVPFYGMDV

SEQ ID NO: 1898 - protein, 9 aa, synthetic construct
  REGION 1..9: note = Synthetic polypeptide representing artificial human antibody CDR-L3 region
QQTNTFPLT

SEQ ID NO: 1899 - protein, 9 aa, synthetic construct
  REGION 1..9: note = Synthetic polypeptide representing artificial human antibody CDR-L3 region
QQSYSTPPR

SEQ ID NO: 1900 - protein, 9 aa, synthetic construct
  REGION 1..9: note = Synthetic polypeptide representing artificial human antibody CDR-L3 region
QQSNSFPGT

SEQ ID NO: 1901 - protein, 11 aa, synthetic construct
  REGION 1..11: note = Synthetic polypeptide representing artificial human antibody CDR-L3 region
AAWEDSLSGPV

SEQ ID NO: 1902 - protein, 9 aa, synthetic construct
  REGION 1..9: note = Synthetic polypeptide representing artificial human antibody CDR-L3 region
NSRDRSGYV

SEQ ID NO: 1903 - protein, 11 aa, synthetic construct
  REGION 1..11: note = Synthetic polypeptide representing artificial human antibody CDR-L3 region
QVWDNGHSHWV

SEQ ID NO: 1904 - protein, 9 aa, synthetic construct
  REGION 1..9: note = Synthetic polypeptide representing artificial human antibody CDR-L3 region
QQSYRMPCS

SEQ ID NO: 1905 - protein, 10 aa, synthetic construct
  REGION 1..10: note = Synthetic polypeptide representing artificial human antibody CDR-L3 region
QQYGSSPPIT

SEQ ID NO: 1906 - protein, 9 aa, synthetic construct
  REGION 1..9: note = Synthetic polypeptide representing artificial human antibody CDR-L3 region
QSYDTTNVI

SEQ ID NO: 1907 - protein, 9 aa, synthetic construct
  REGION 1..9: note = Synthetic polypeptide representing artificial human antibody CDR-L3 region
QQYDSSPFT

SEQ ID NO: 1908 - protein, 10 aa, synthetic construct
  REGION 1..10: note = Synthetic polypeptide representing artificial human antibody CDR-L3 region
GTWDDNLSAV

SEQ ID NO: 1909 - protein, 9 aa, synthetic construct
  REGION 1..9: note = Synthetic polypeptide representing artificial human antibody CDR-L3 region
LQGTHWPPT

SEQ ID NO: 1910 - protein, 11 aa, synthetic construct
  REGION 1..11: note = Synthetic polypeptide representing artificial human antibody CDR-L3 region
AAWDDNVSGPG

SEQ ID NO: 1911 - protein, 11 aa, synthetic construct
  REGION 1..11: note = Synthetic polypeptide representing artificial human antibody CDR-L3 region
ATWDDSLNGPV

SEQ ID NO: 1912 - protein, 8 aa, synthetic construct
  REGION 1..8: note = Synthetic polypeptide representing artificial human antibody CDR-L3 region
QQYNNWWT

SEQ ID NO: 1913 - protein, 9 aa, synthetic construct
  REGION 1..9: note = Synthetic polypeptide representing artificial human antibody CDR-L3 region
QQYGSFRYT

SEQ ID NO: 1914 - protein, 10 aa, synthetic construct
  REGION 1..10: note = Synthetic polypeptide representing artificial human antibody CDR-L3 region
QSADSSDTYV

SEQ ID NO: 1915 - protein, 9 aa, synthetic construct
  REGION 1..9: note = Synthetic polypeptide representing artificial human antibody CDR-L3 region
QQRSNWPLT

SEQ ID NO: 1916 - protein, 10 aa, synthetic construct
  REGION 1..10: note = Synthetic polypeptide representing artificial human antibody CDR-L3 region
QQGSNWLALT

SEQ ID NO: 1917 - protein, 9 aa, synthetic construct
  REGION 1..9: note = Synthetic polypeptide representing artificial human antibody CDR-L3 region
QQYYINPRT

SEQ ID NO: 1918 - protein, 9 aa, synthetic construct
  REGION 1..9: note = Synthetic polypeptide representing artificial human antibody CDR-L3 region
QQYYSTPYT

SEQ ID NO: 1919 - protein, 9 aa, synthetic construct
  REGION 1..9: note = Synthetic polypeptide representing artificial human antibody CDR-L3 region
QQSFNTVLT

SEQ ID NO: 1920 - protein, 11 aa, synthetic construct
  REGION 1..11: note = Synthetic polypeptide representing artificial human antibody CDR-L3 region
SSYTITSTLWV

SEQ ID NO: 1921 - protein, 11 aa, synthetic construct
  REGION 1..11: note = Synthetic polypeptide representing artificial human antibody CDR-L3 region
AAWDDSLSGPV

SEQ ID NO: 1922 - protein, 9 aa, synthetic construct
  REGION 1..9: note = Synthetic polypeptide representing artificial human antibody CDR-L3 region
QQTYSNPWT

SEQ ID NO: 1923 - protein, 9 aa, synthetic construct
  REGION 1..9: note = Synthetic polypeptide representing artificial human antibody CDR-L3 region
QQTYSHPRT

SEQ ID NO: 1924 - protein, 11 aa, synthetic construct
  REGION 1..11: note = Synthetic polypeptide representing artificial human antibody CDR-L3 region
QSYDSSLSGYV

SEQ ID NO: 1925 - protein, 11 aa, synthetic construct
  REGION 1..11: note = Synthetic polypeptide representing artificial human antibody CDR-L3 region
QVWDSSSDHYV

SEQ ID NO: 1926 - protein, 9 aa, synthetic construct
  REGION 1..9: note = Synthetic polypeptide representing artificial human antibody CDR-L3 region
QQTSSFPRT

SEQ ID NO: 1927 - protein, 10 aa, synthetic construct
  REGION 1..10: note = Synthetic polypeptide representing artificial human antibody CDR-L3 region
QSVDITSTWV

SEQ ID NO: 1928 - protein, 11 aa, synthetic construct
  REGION 1..11: note = Synthetic polypeptide representing artificial human antibody CDR-L3 region
SSYISSLTYVL

SEQ ID NO: 1929 - protein, 11 aa, synthetic construct
  REGION 1..11: note = Synthetic polypeptide representing artificial human antibody CDR-L3 region
GTWDSSLSVGV

SEQ ID NO: 1930 - protein, 9 aa, synthetic construct
  REGION 1..9: note = Synthetic polypeptide representing artificial human antibody CDR-L3 region
MQGTHWPIT

SEQ ID NO: 1931 - protein, 9 aa, synthetic construct
  REGION 1..9: note = Synthetic polypeptide representing artificial human antibody CDR-L3 region
QQYDSSSWT

SEQ ID NO: 1932 - protein, 11 aa, synthetic construct
  REGION 1..11: note = Synthetic polypeptide representing artificial human antibody CDR-L3 region
QSYDSSLRGVV

SEQ ID NO: 1933 - protein, 9 aa, synthetic construct
  REGION 1..9: note = Synthetic polypeptide representing artificial human antibody CDR-L3 region
QQSYSTPRT

SEQ ID NO: 1934 - protein, 9 aa, synthetic construct
  REGION 1..9: note = Synthetic polypeptide representing artificial human antibody CDR-L3 region
QQYYSTPWT

SEQ ID NO: 1935 - protein, 13 aa, synthetic construct
  REGION 1..13: note = Synthetic polypeptide representing artificial human antibody CDR-L3 region
QSYDSGLSGSKVV

SEQ ID NO: 1936 - protein, 9 aa, synthetic construct
  REGION 1..9: note = Synthetic polypeptide representing artificial human antibody CDR-L3 region
QSYDLSTWV

SEQ ID NO: 1937 - protein, 9 aa, synthetic construct
  REGION 1..9: note = Synthetic polypeptide representing artificial human antibody CDR-L3 region
HQSYSTSLT

SEQ ID NO: 1938 - protein, 11 aa, synthetic construct
  REGION 1..11: note = Synthetic polypeptide representing artificial human antibody CDR-L3 region
QVWDSSSDHWV

SEQ ID NO: 1939 - protein, 10 aa, synthetic construct
  REGION 1..10: note = Synthetic polypeptide representing artificial human antibody CDR-L3 region
SSYTSSSTQV

SEQ ID NO: 1940 - protein, 9 aa, synthetic construct
  REGION 1..9: note = Synthetic polypeptide representing artificial human antibody CDR-L3 region
QQSYSTPKT

SEQ ID NO: 1941 - protein, 10 aa, synthetic construct
  REGION 1..10: note = Synthetic polypeptide representing artificial human antibody CDR-L3 region
QQFNTYPLYT

SEQ ID NO: 1942 - protein, 11 aa, synthetic construct
  REGION 1..11: note = Synthetic polypeptide representing artificial human antibody CDR-L3 region
DSRDSSGNLVV

SEQ ID NO: 1943 - protein, 9 aa, synthetic construct
  REGION 1..9: note = Synthetic polypeptide representing artificial human antibody CDR-L3 region
QQTNSFPRT

SEQ ID NO: 1944 - protein, 10 aa, synthetic construct
  REGION 1..10: note = Synthetic polypeptide representing artificial human antibody CDR-L3 region
QQSYSVPPWT

SEQ ID NO: 1945 - protein, 10 aa, synthetic construct
  REGION 1..10: note = Synthetic polypeptide representing artificial human antibody CDR-L3 region
QQYGSSPRYT

SEQ ID NO: 1946 - protein, 8 aa, synthetic construct
  REGION 1..8: note = Synthetic polypeptide representing artificial human antibody CDR-L3 region
QQYGSAWT

SEQ ID NO: 1947 - protein, 10 aa, synthetic construct
  REGION 1..10: note = Synthetic polypeptide representing artificial human antibody CDR-L3 region
QQRANWPPIT

SEQ ID NO: 1948 - protein, 9 aa, synthetic construct
  REGION 1..9: note = Synthetic polypeptide representing artificial human antibody CDR-L3 region
QQYNSYPWT

SEQ ID NO: 1949 - protein, 12 aa, synthetic construct
  REGION 1..12: note = Synthetic polypeptide representing artificial human antibody CDR-L3 region
QVWDSSSDHYVV

SEQ ID NO: 1950 - protein, 10 aa, synthetic construct
  REGION 1..10: note = Synthetic polypeptide representing artificial human antibody CDR-L3 region
QQRSNWPPLT

SEQ ID NO: 1951 - protein, 9 aa, synthetic construct
  REGION 1..9: note = Synthetic polypeptide representing artificial human antibody CDR-L3 region
MQALQTPYT

SEQ ID NO: 1952 - protein, 8 aa, synthetic construct
  REGION 1..8: note = Synthetic polypeptide representing artificial human antibody CDR-L3 region
QQYNSYST

SEQ ID NO: 1953 - protein, 10 aa, synthetic construct
  REGION 1..10: note = Synthetic polypeptide representing artificial human antibody CDR-L3 region
LLYMGSGISV

SEQ ID NO: 1954 - protein, 10 aa, synthetic construct
  REGION 1..10: note = Synthetic polypeptide representing artificial human antibody CDR-L3 region
QHYGASPPWT

SEQ ID NO: 1955 - protein, 12 aa, synthetic construct
  REGION 1..12: note = Synthetic polypeptide representing artificial human antibody CDR-L3 region
QVWDSNNDHREV

SEQ ID NO: 1956 - protein, 9 aa, synthetic construct
  REGION 1..9: note = Synthetic polypeptide representing artificial human antibody CDR-L3 region
QQYDSYPLS

SEQ ID NO: 1957 - protein, 9 aa, synthetic construct
  REGION 1..9: note = Synthetic polypeptide representing artificial human antibody CDR-L3 region
LQHDNFPYT

SEQ ID NO: 1958 - protein, 9 aa, synthetic construct
  REGION 1..9: note = Synthetic polypeptide representing artificial human antibody CDR-L3 region
QQYGSSPLT

SEQ ID NO: 1959 - protein, 11 aa, synthetic construct
  REGION 1..11: note = Synthetic polypeptide representing artificial human antibody CDR-L3 region
YSTDSSGNHGV

SEQ ID NO: 1960 - protein, 9 aa, synthetic construct
  REGION 1..9: note = Synthetic polypeptide representing artificial human antibody CDR-L3 region
MQALQTPNT

SEQ ID NO: 1961 - protein, 11 aa, synthetic construct
  REGION 1..11: note = Synthetic polypeptide representing artificial human antibody CDR-L3 region
NSYSSSSTLYV

SEQ ID NO: 1962 - protein, 10 aa, synthetic construct
  REGION 1..10: note = Synthetic polypeptide representing artificial human antibody CDR-L3 region
QQHSNWPELT

SEQ ID NO: 1963 - protein, 10 aa, synthetic construct
  REGION 1..10: note = Synthetic polypeptide representing artificial human antibody CDR-L3 region
SSYRSSGVYV

SEQ ID NO: 1964 - protein, 9 aa, synthetic construct
  REGION 1..9: note = Synthetic polypeptide representing artificial human antibody CDR-L3 region
MQSIHLPYT

SEQ ID NO: 1965 - protein, 10 aa, synthetic construct
  REGION 1..10: note = Synthetic polypeptide representing artificial human antibody CDR-L3 region
HQYGGSPPNT

SEQ ID NO: 1966 - protein, 10 aa, synthetic construct
  REGION 1..10: note = Synthetic polypeptide representing artificial human antibody CDR-L3 region
QQLNSYPPLT

SEQ ID NO: 1967 - protein, 11 aa, synthetic construct
  REGION 1..11: note = Synthetic polypeptide representing artificial human antibody CDR-L3 region
ATWDSSLTAGV

SEQ ID NO: 1968 - protein, 9 aa, synthetic construct
  REGION 1..9: note = Synthetic polypeptide representing artificial human antibody CDR-L3 region
QQRSAWPIT

SEQ ID NO: 1969 - protein, 10 aa, synthetic construct
  REGION 1..10: note = Synthetic polypeptide representing artificial human antibody CDR-L3 region
QQYGSSRKLT

SEQ ID NO: 1970 - protein, 9 aa, synthetic construct
  REGION 1..9: note = Synthetic polypeptide representing artificial human antibody CDR-L3 region
QHYDSYPWT

SEQ ID NO: 1971 - protein, 11 aa, synthetic construct
  REGION 1..11: note = Synthetic polypeptide representing artificial human antibody CDR-L3 region
CSRDSSGNPWV

SEQ ID NO: 1972 - protein, 9 aa, synthetic construct
  REGION 1..9: note = Synthetic polypeptide representing artificial human antibody CDR-L3 region
QQSYSTSLT

SEQ ID NO: 1973 - protein, 11 aa, synthetic construct
  REGION 1..11: note = Synthetic polypeptide representing artificial human antibody CDR-L3 region
QQYDSSPPMYT

SEQ ID NO: 1974 - protein, 12 aa, synthetic construct
  REGION 1..12: note = Synthetic polypeptide representing artificial human antibody CDR-L3 region
GTWDSSLSPGGV

SEQ ID NO: 1975 - protein, 8 aa, synthetic construct
  REGION 1..8: note = Synthetic polypeptide representing artificial human antibody CDR-L3 region
QQSYNART

SEQ ID NO: 1976 - protein, 10 aa, synthetic construct
  REGION 1..10: note = Synthetic polypeptide representing artificial human antibody CDR-L3 region
QQYYDTAPLT

SEQ ID NO: 1977 - protein, 9 aa, synthetic construct
  REGION 1..9: note = Synthetic polypeptide representing artificial human antibody CDR-L3 region
QQYSKWPIT

SEQ ID NO: 1978 - protein, 9 aa, synthetic construct
  REGION 1..9: note = Synthetic polypeptide representing artificial human antibody CDR-L3 region
QQTYTTPRT

SEQ ID NO: 1979 - protein, 11 aa, synthetic construct
  REGION 1..11: note = Synthetic polypeptide representing artificial human antibody CDR-L3 region
QSYDSRLSGVV

SEQ ID NO: 1980 - protein, 9 aa, synthetic construct
  REGION 1..9: note = Synthetic polypeptide representing artificial human antibody CDR-L3 region
QQYTTRPLT

SEQ ID NO: 1981 - protein, 9 aa, synthetic construct
  REGION 1..9: note = Synthetic polypeptide representing artificial human antibody CDR-L3 region
QQRSKWPLT

SEQ ID NO: 1982 - protein, 12 aa, synthetic construct
  REGION 1..12: note = Synthetic polypeptide representing artificial human antibody CDR-L3 region
ATWDDSLGGRVV

SEQ ID NO: 1983 - protein, 9 aa, synthetic construct
  REGION 1..9: note = Synthetic polypeptide representing artificial human antibody CDR-L3 region
MQRIEFPFT

SEQ ID NO: 1984 - protein, 9 aa, synthetic construct
  REGION 1..9: note = Synthetic polypeptide representing artificial human antibody CDR-L3 region
QAWDSSTAV

SEQ ID NO: 1985 - protein, 9 aa, synthetic construct
  REGION 1..9: note = Synthetic polypeptide representing artificial human antibody CDR-L3 region
QSWDSSSVL

SEQ ID NO: 1986 - protein, 9 aa, synthetic construct
  REGION 1..9: note = Synthetic polypeptide representing artificial human antibody CDR-L3 region
QQYYGRLFT

SEQ ID NO: 1987 - protein, 11 aa, synthetic construct
  REGION 1..11: note = Synthetic polypeptide representing artificial human antibody CDR-L3 region
QQRSNWPPRLP

SEQ ID NO: 1988 - protein, 10 aa, synthetic construct
  REGION 1..10: note = Synthetic polypeptide representing artificial human antibody CDR-L3 region
QQRSNWPPYT

SEQ ID NO: 1989 - protein, 9 aa, synthetic construct
  REGION 1..9: note = Synthetic polypeptide representing artificial human antibody CDR-L3 region
MQALQTPYT

SEQ ID NO: 1990 - protein, 9 aa, synthetic construct
  REGION 1..9: note = Synthetic polypeptide representing artificial human antibody CDR-L3 region
QHYDSYIGT

SEQ ID NO: 1991 - protein, 11 aa, synthetic construct
  REGION 1..11: note = Synthetic polypeptide representing artificial human antibody CDR-L3 region
GTWDSSLGGGV

SEQ ID NO: 1992 - protein, 10 aa, synthetic construct
  REGION 1..10: note = Synthetic polypeptide representing artificial human antibody CDR-L3 region
QQRSNWPPYT

SEQ ID NO: 1993 - protein, 9 aa, synthetic construct
  REGION 1..9: note = Synthetic polypeptide representing artificial human antibody CDR-L3 region
MEAEQTPGT

SEQ ID NO: 1994 - protein, 10 aa, synthetic construct
  REGION 1..10: note = Synthetic polypeptide representing artificial human antibody CDR-L3 region
SSYTSSTTVL

SEQ ID NO: 1995 - protein, 10 aa, synthetic construct
  REGION 1..10: note = Synthetic polypeptide representing artificial human antibody CDR-L3 region
MQGTHWPPIT

SEQ ID NO: 1996 - protein, 9 aa, synthetic construct
  REGION 1..9: note = Synthetic polypeptide representing artificial human antibody CDR-L3 region
HQTYSTRLT

SEQ ID NO: 1997 - protein, 9 aa, synthetic construct
  REGION 1..9: note = Synthetic polypeptide representing artificial human antibody CDR-L3 region
QQYDNLPLT

SEQ ID NO: 1998 - protein, 11 aa, synthetic construct
  REGION 1..11: note = Synthetic polypeptide representing artificial human antibody CDR-L3 region
QVWDSSSDPWV

SEQ ID NO: 1999 - protein, 10 aa, synthetic construct
  REGION 1..10: note = Synthetic polypeptide representing artificial human antibody CDR-L3 region
QQLNSYPPVT

SEQ ID NO: 2000 - protein, 9 aa, synthetic construct
  REGION 1..9: note = Synthetic polypeptide representing artificial human antibody CDR-L3 region
QQSYSTPYT

SEQ ID NO: 2001 - protein, 10 aa, synthetic construct
  REGION 1..10: note = Synthetic polypeptide representing artificial human antibody CDR-L3 region
QQYSSSSPRT

SEQ ID NO: 2002 - protein, 9 aa, synthetic construct
  REGION 1..9: note = Synthetic polypeptide representing artificial human antibody CDR-L3 region
MQSLQLPIT

SEQ ID NO: 2003 - protein, 10 aa, synthetic construct
  REGION 1..10: note = Synthetic polypeptide representing artificial human antibody CDR-L3 region
QQSYSTRLLT

SEQ ID NO: 2004 - protein, 11 aa, synthetic construct
  REGION 1..11: note = Synthetic polypeptide representing artificial human antibody CDR-L3 region
QSFDSSLRGYV

SEQ ID NO: 2005 - protein, 11 aa, synthetic construct
  REGION 1..11: note = Synthetic polypeptide representing artificial human antibody CDR-L3 region
QHRITWPPLIT

SEQ ID NO: 2006 - protein, 9 aa, synthetic construct
  REGION 1..9: note = Synthetic polypeptide representing artificial human antibody CDR-L3 region
QQYAYVPIT

SEQ ID NO: 2007 - protein, 9 aa, synthetic construct
  REGION 1..9: note = Synthetic polypeptide representing artificial human antibody CDR-L3 region
QQYYSIPLT

SEQ ID NO: 2008 - protein, 9 aa, synthetic construct
  REGION 1..9: note = Synthetic polypeptide representing artificial human antibody CDR-L3 region
QQYGSSPLW

SEQ ID NO: 2009 - protein, 10 aa, synthetic construct
  REGION 1..10: note = Synthetic polypeptide representing artificial human antibody CDR-L3 region
SSYTSSSTQV

SEQ ID NO: 2010 - protein, 11 aa, synthetic construct
  REGION 1..11: note = Synthetic polypeptide representing artificial human antibody CDR-L3 region
YSTDSSGNHRV

SEQ ID NO: 2011 - protein, 10 aa, synthetic construct
  REGION 1..10: note = Synthetic polypeptide representing artificial human antibody CDR-L3 region
QQYNNWPQYT

SEQ ID NO: 2012 - protein, 11 aa, synthetic construct
  REGION 1..11: note = Synthetic polypeptide representing artificial human antibody CDR-L3 region
QHFRSSPPTYT

SEQ ID NO: 2013 - protein, 10 aa, synthetic construct
  REGION 1..10: note = Synthetic polypeptide representing artificial human antibody CDR-L3 region
SSYSRTTTLV

SEQ ID NO: 2014 - protein, 12 aa, synthetic construct
  REGION 1..12: note = Synthetic polypeptide representing artificial human antibody CDR-L3 region
QSYDSGLSAPWV

SEQ ID NO: 2015 - protein, 9 aa, synthetic construct
  REGION 1..9: note = Synthetic polypeptide representing artificial human antibody CDR-L3 region
QQYGNSPPT

SEQ ID NO: 2016 - protein, 11 aa, synthetic construct
  REGION 1..11: note = Synthetic polypeptide representing artificial human antibody CDR-L3 region
ATWDDDLSGPV

SEQ ID NO: 2017 - protein, 9 aa, synthetic construct
  REGION 1..9: note = Synthetic polypeptide representing artificial human antibody CDR-L3 region
LQHDTFPLT

SEQ ID NO: 2018 - protein, 9 aa, synthetic construct
  REGION 1..9: note = Synthetic polypeptide representing artificial human antibody CDR-L3 region
QQYNSYSWT

SEQ ID NO: 2019 - protein, 9 aa, synthetic construct
  REGION 1..9: note = Synthetic polypeptide representing artificial human antibody CDR-L3 region
QHLTSFPYT

SEQ ID NO: 2020 - protein, 11 aa, synthetic construct
  REGION 1..11: note = Synthetic polypeptide representing artificial human antibody CDR-L3 region
GSRDSSGNPSV

SEQ ID NO: 2021 - protein, 9 aa, synthetic construct
  REGION 1..9: note = Synthetic polypeptide representing artificial human antibody CDR-L3 region
QQRSNWLYT

SEQ ID NO: 2022 - protein, 12 aa, synthetic construct
  REGION 1..12: note = Synthetic polypeptide representing artificial human antibody CDR-L3 region
QVWDSSSDHQEV

SEQ ID NO: 2023 - protein, 10 aa, synthetic construct
  REGION 1..10: note = Synthetic polypeptide representing artificial human antibody CDR-L3 region
CSYAPSNTYV

SEQ ID NO: 2024 - protein, 9 aa, synthetic construct
  REGION 1..9: note = Synthetic polypeptide representing artificial human antibody CDR-L3 region
QQRSNWPLT

SEQ ID NO: 2025 - protein, 12 aa, synthetic construct
  REGION 1..12: note = Synthetic polypeptide representing artificial human antibody CDR-L3 region
NSRDSSAHDHLL

SEQ ID NO: 2026 - protein, 10 aa, synthetic construct
  REGION 1..10: note = Synthetic polypeptide representing artificial human antibody CDR-L3 region
QHFGDSPLYI

SEQ ID NO: 2027 - protein, 9 aa, synthetic construct
  REGION 1..9: note = Synthetic polypeptide representing artificial human antibody CDR-L3 region
QVWDSSTAV

SEQ ID NO: 2028 - protein, 11 aa, synthetic construct
  REGION 1..11: note = Synthetic polypeptide representing artificial human antibody CDR-L3 region
QVWDSSSDHVV

SEQ ID NO: 2029 - protein, 11 aa, synthetic construct
  REGION 1..11: note = Synthetic polypeptide representing artificial human antibody CDR-L3 region
QSADSSGFYVV

SEQ ID NO: 2030 - protein, 9 aa, synthetic construct
  REGION 1..9: note = Synthetic polypeptide representing artificial human antibody CDR-L3 region
QSADSSSPV

SEQ ID NO: 2031 - protein, 10 aa, synthetic construct
  REGION 1..10: note = Synthetic polypeptide representing artificial human antibody CDR-L3 region
YSTDSRATGV

SEQ ID NO: 2032 - protein, 9 aa, synthetic construct
  REGION 1..9: note = Synthetic polypeptide representing artificial human antibody CDR-L3 region
QQSYSTPQT

SEQ ID NO: 2033 - protein, 9 aa, synthetic construct
  REGION 1..9: note = Synthetic polypeptide representing artificial human antibody CDR-L3 region
QQYENLPLT

SEQ ID NO: 2034 - protein, 9 aa, synthetic construct
  REGION 1..9: note = Synthetic polypeptide representing artificial human antibody CDR-L3 region
QQFDNLPLT

SEQ ID NO: 2035 - protein, 10 aa, synthetic construct
  REGION 1..10: note = Synthetic polypeptide representing artificial human antibody CDR-L3 region
SSYAGSYTWV

SEQ ID NO: 2036 - protein, 9 aa, synthetic construct
  REGION 1..9: note = Synthetic polypeptide representing artificial human antibody CDR-L3 region
QAWDSSTVV

SEQ ID NO: 2037 - protein, 11 aa, synthetic construct
  REGION 1..11: note = Synthetic polypeptide representing artificial human antibody CDR-L3 region
GTWDSSLGAYV

SEQ ID NO: 2038 - protein, 8 aa, synthetic construct
  REGION 1..8: note = Synthetic polypeptide representing artificial human antibody CDR-L3 region
QQYGSSLT

SEQ ID NO: 2039 - protein, 9 aa, synthetic construct
  REGION 1..9: note = Synthetic polypeptide representing artificial human antibody CDR-L3 region
QQYGSSPLT

SEQ ID NO: 2040 - protein, 10 aa, synthetic construct
  REGION 1..10: note = Synthetic polypeptide representing artificial human antibody CDR-L3 region
SSYTSSRSLV

SEQ ID NO: 2041 - protein, 9 aa, synthetic construct
  REGION 1..9: note = Synthetic polypeptide representing artificial human antibody CDR-L3 region
QQTYSTPWT

SEQ ID NO: 2042 - protein, 8 aa, synthetic construct
  REGION 1..8: note = Synthetic polypeptide representing artificial human antibody CDR-L3 region
QQYNNWLT

SEQ ID NO: 2043 - protein, 9 aa, synthetic construct
  REGION 1..9: note = Synthetic polypeptide representing artificial human antibody CDR-L3 region
YSTPDNNGV

SEQ ID NO: 2044 - protein, 10 aa, synthetic construct
  REGION 1..10: note = Synthetic polypeptide representing artificial human antibody CDR-L3 region
SSYTTSNSVV

SEQ ID NO: 2045 - protein, 9 aa, synthetic construct
  REGION 1..9: note = Synthetic polypeptide representing artificial human antibody CDR-L3 region
QQYDNSPLT

SEQ ID NO: 2046 - protein, 9 aa, synthetic construct
  REGION 1..9: note = Synthetic polypeptide representing artificial human antibody CDR-L3 region
QQYWGTPYT

SEQ ID NO: 2047 - protein, 10 aa, synthetic construct
  REGION 1..10: note = Synthetic polypeptide representing artificial human antibody CDR-L3 region
QSYDSGLGVV

SEQ ID NO: 2048 - protein, 10 aa, synthetic construct
  REGION 1..10: note = Synthetic polypeptide representing artificial human antibody CDR-L3 region
SSYAGINNLV

SEQ ID NO: 2049 - protein, 9 aa, synthetic construct
  REGION 1..9: note = Synthetic polypeptide representing artificial human antibody CDR-L3 region
QQYNSYSQT

SEQ ID NO: 2050 - protein, 9 aa, synthetic construct
  REGION 1..9: note = Synthetic polypeptide representing artificial human antibody CDR-L3 region
QQYTDWPYT

SEQ ID NO: 2051 - protein, 8 aa, synthetic construct
  REGION 1..8: note = Synthetic polypeptide representing artificial human antibody CDR-L3 region
QTWGTVGV

SEQ ID NO: 2052 - protein, 9 aa, synthetic construct
  REGION 1..9: note = Synthetic polypeptide representing artificial human antibody CDR-L3 region
QQYGSSPWT

SEQ ID NO: 2053 - protein, 11 aa, synthetic construct
  REGION 1..11: note = Synthetic polypeptide representing artificial human antibody CDR-L3 region
QSYDSSLSGYV

SEQ ID NO: 2054 - protein, 11 aa, synthetic construct
  REGION 1..11: note = Synthetic polypeptide representing artificial human antibody CDR-L3 region
QCFDTSLTAKV

SEQ ID NO: 2055 - protein, 9 aa, synthetic construct
  REGION 1..9: note = Synthetic polypeptide representing artificial human antibody CDR-L3 region
MQALQVPRT

SEQ ID NO: 2056 - protein, 9 aa, synthetic construct
  REGION 1..9: note = Synthetic polypeptide representing artificial human antibody CDR-L3 region
QQLNSYPLT

SEQ ID NO: 2057 - protein, 11 aa, synthetic construct
  REGION 1..11: note = Synthetic polypeptide representing artificial human antibody CDR-L3 region
AAWDDSLSGPV

SEQ ID NO: 2058 - protein, 9 aa, synthetic construct
  REGION 1..9: note = Synthetic polypeptide representing artificial human antibody CDR-L3 region
MQALQTPWT

SEQ ID NO: 2059 - protein, 12 aa, synthetic construct
  REGION 1..12: note = Synthetic polypeptide representing artificial human antibody CDR-L3 region
NSRDSSDDHLEV

SEQ ID NO: 2060 - protein, 9 aa, synthetic construct
  REGION 1..9: note = Synthetic polypeptide representing artificial human antibody CDR-L3 region
QQYNSYPRT

SEQ ID NO: 2061 - protein, 9 aa, synthetic construct
  REGION 1..9: note = Synthetic polypeptide representing artificial human antibody CDR-L3 region
QQYFTTPRT

SEQ ID NO: 2062 - protein, 12 aa, synthetic construct
  REGION 1..12: note = Synthetic polypeptide representing artificial human antibody CDR-L3 region
AAWDDGLGGLYV

SEQ ID NO: 2063 - protein, 8 aa, synthetic construct
  REGION 1..8: note = Synthetic polypeptide representing artificial human antibody CDR-L3 region
QQYNRGST

SEQ ID NO: 2064 - protein, 11 aa, synthetic construct
  REGION 1..11: note = Synthetic polypeptide representing artificial human antibody CDR-L3 region
QVWDRNSHRVI

SEQ ID NO: 2065 - protein, 11 aa, synthetic construct
  REGION 1..11: note = Synthetic polypeptide representing artificial human antibody CDR-L3 region
QSYDNSLSAWV

SEQ ID NO: 2066 - protein, 11 aa, synthetic construct
  REGION 1..11: note = Synthetic polypeptide representing artificial human antibody CDR-L3 region
NSRDSSGNHWV

SEQ ID NO: 2067 - protein, 11 aa, synthetic construct
  REGION 1..11: note = Synthetic polypeptide representing artificial human antibody CDR-L3 region
SSYIRSSTPVV

SEQ ID NO: 2068 - protein, 9 aa, synthetic construct
  REGION 1..9: note = Synthetic polypeptide representing artificial human antibody CDR-L3 region
QQYYDTPYT

SEQ ID NO: 2069 - protein, 10 aa, synthetic construct
  REGION 1..10: note = Synthetic polypeptide representing artificial human antibody CDR-L3 region
SSYTSSSTLV

SEQ ID NO: 2070 - protein, 8 aa, synthetic construct
  REGION 1..8: note = Synthetic polypeptide representing artificial human antibody CDR-L3 region
QQYDNLWT

SEQ ID NO: 2071 - protein, 12 aa, synthetic construct
  REGION 1..12: note = Synthetic polypeptide representing artificial human antibody CDR-L3 region
QVWDSSSDHLYV

SEQ ID NO: 2072 - protein, 9 aa, synthetic construct
  REGION 1..9: note = Synthetic polypeptide representing artificial human antibody CDR-L3 region
HQYGSSPRT

SEQ ID NO: 2073 - protein, 12 aa, synthetic construct
  REGION 1..12: note = Synthetic polypeptide representing artificial human antibody CDR-L3 region
GTWDSSLTGGFV

SEQ ID NO: 2074 - protein, 11 aa, synthetic construct
  REGION 1..11: note = Synthetic polypeptide representing artificial human antibody CDR-L3 region
QVWDTSNDVGV

SEQ ID NO: 2075 - protein, 9 aa, synthetic construct
  REGION 1..9: note = Synthetic polypeptide representing artificial human antibody CDR-L3 region
QQYGSSPPT

SEQ ID NO: 2076 - protein, 10 aa, synthetic construct
  REGION 1..10: note = Synthetic polypeptide representing artificial human antibody CDR-L3 region
CSYAGSSNWV

SEQ ID NO: 2077 - protein, 8 aa, synthetic construct
  REGION 1..8: note = Synthetic polypeptide representing artificial human antibody CDR-L3 region
MQGTHWSA

SEQ ID NO: 2078 - protein, 11 aa, synthetic construct
  REGION 1..11: note = Synthetic polypeptide representing artificial human antibody CDR-L3 region
AAWDDSLSGQV

SEQ ID NO: 2079 - protein, 10 aa, synthetic construct
  REGION 1..10: note = Synthetic polypeptide representing artificial human antibody CDR-L3 region
NSRDSSGNHV

SEQ ID NO: 2080 - protein, 8 aa, synthetic construct
  REGION 1..8: note = Synthetic polypeptide representing artificial human antibody CDR-L3 region
QQSYSTPT

SEQ ID NO: 2081 - protein, 11 aa, synthetic construct
  REGION 1..11: note = Synthetic polypeptide representing artificial human antibody CDR-L3 region
QVWESGGDHPV

SEQ ID NO: 2082 - protein, 9 aa, synthetic construct
  REGION 1..9: note = Synthetic polypeptide representing artificial human antibody CDR-L3 region
LQHNNYPLT

SEQ ID NO: 2083 - protein, 9 aa, synthetic construct
  REGION 1..9: note = Synthetic polypeptide representing artificial human antibody CDR-L3 region
QQYNSYPYT

SEQ ID NO: 2084 - protein, 9 aa, synthetic construct
  REGION 1..9: note = Synthetic polypeptide representing artificial human antibody CDR-L3 region
MQALQIPRT

SEQ ID NO: 2085 - protein, 9 aa, synthetic construct
  REGION 1..9: note = Synthetic polypeptide representing artificial human antibody CDR-L3 region
QAWDSNVHV

SEQ ID NO: 2086 - protein, 11 aa, synthetic construct
  REGION 1..11: note = Synthetic polypeptide representing artificial human antibody CDR-L3 region
YSTDSSGNVWV

SEQ ID NO: 2087 - protein, 11 aa, synthetic construct
  REGION 1..11: note = Synthetic polypeptide representing artificial human antibody CDR-L3 region
NSRDSSGNLYV

SEQ ID NO: 2088 - protein, 9 aa, synthetic construct
  REGION 1..9: note = Synthetic polypeptide representing artificial human antibody CDR-L3 region
QQYYSSPLT

SEQ ID NO: 2089 - protein, 10 aa, synthetic construct
  REGION 1..10: note = Synthetic polypeptide representing artificial human antibody CDR-L3 region
MQALQTPPYT

SEQ ID NO: 2090 - protein, 10 aa, synthetic construct
  REGION 1..10: note = Synthetic polypeptide representing artificial human antibody CDR-L3 region
SSYTSSSTWV

SEQ ID NO: 2091 - protein, 9 aa, synthetic construct
  REGION 1..9: note = Synthetic polypeptide representing artificial human antibody CDR-L3 region
QQSYSTPYT

SEQ ID NO: 2092 - protein, 11 aa, synthetic construct
  REGION 1..11: note = Synthetic polypeptide representing artificial human antibody CDR-L3 region
CSYAGSSTPWV

SEQ ID NO: 2093 - protein, 11 aa, synthetic construct
  REGION 1..11: note = Synthetic polypeptide representing artificial human antibody CDR-L3 region
YSPDSSGNVWV

SEQ ID NO: 2094 - protein, 5 aa, synthetic construct
  REGION 1..5: note = Synthetic polypeptide representing artificial human antibody CDR-L3 region
QSRGT

SEQ ID NO: 2095 - protein, 9 aa, synthetic construct
  REGION 1..9: note = Synthetic polypeptide representing artificial human antibody CDR-L3 region
QQYGSSHYT

SEQ ID NO: 2096 - protein, 12 aa, synthetic construct
  REGION 1..12: note = Synthetic polypeptide representing artificial human antibody CDR-L3 region
QVWDSSSDHPWV

SEQ ID NO: 2097 - protein, 11 aa, synthetic construct
  REGION 1..11: note = Synthetic polypeptide representing artificial human antibody CDR-L3 region
CSYRSSTAPVV

SEQ ID NO: 2098 - protein, 9 aa, synthetic construct
  REGION 1..9: note = Synthetic polypeptide representing artificial human antibody CDR-L3 region
QQYFSTPWT

SEQ ID NO: 2099 - protein, 11 aa, synthetic construct
  REGION 1..11: note = Synthetic polypeptide representing artificial human antibody CDR-L3 region
QVWDGYSDPLV

SEQ ID NO: 2100 - protein, 9 aa, synthetic construct
  REGION 1..9: note = Synthetic polypeptide representing artificial human antibody CDR-L3 region
QQSYYTPPT

SEQ ID NO: 2101 - protein, 12 aa, synthetic construct
  REGION 1..12: note = Synthetic polypeptide representing artificial human antibody CDR-L3 region
AAWDDSLNGLWV

SEQ ID NO: 2102 - protein, 10 aa, synthetic construct
  REGION 1..10: note = Synthetic polypeptide representing artificial human antibody CDR-L3 region
QSSDSNNHVV

SEQ ID NO: 2103 - protein, 11 aa, synthetic construct
  REGION 1..11: note = Synthetic polypeptide representing artificial human antibody CDR-L3 region
QSYDSSLSGVL

SEQ ID NO: 2104 - protein, 9 aa, synthetic construct
  REGION 1..9: note = Synthetic polypeptide representing artificial human antibody CDR-L3 region
QQSYSTPFT

SEQ ID NO: 2105 - protein, 9 aa, synthetic construct
  REGION 1..9: note = Synthetic polypeptide representing artificial human antibody CDR-L3 region
QQYDSLPLT

SEQ ID NO: 2106 - protein, 10 aa, synthetic construct
  REGION 1..10: note = Synthetic polypeptide representing artificial human antibody CDR-L3 region
QYYGGSPGFT

SEQ ID NO: 2107 - protein, 10 aa, synthetic construct
  REGION 1..10: note = Synthetic polypeptide representing artificial human antibody CDR-L3 region
CSYAGSSTYV

SEQ ID NO: 2108 - protein, 10 aa, synthetic construct
  REGION 1..10: note = Synthetic polypeptide representing artificial human antibody CDR-L3 region
QEYVKSPGFA

SEQ ID NO: 2109 - protein, 9 aa, synthetic construct
  REGION 1..9: note = Synthetic polypeptide representing artificial human antibody CDR-L3 region
QQYGTSPQT

SEQ ID NO: 2110 - protein, 10 aa, synthetic construct
  REGION 1..10: note = Synthetic polypeptide representing artificial human antibody CDR-L3 region
MLYMGSGISL

SEQ ID NO: 2111 - protein, 12 aa, synthetic construct
  REGION 1..12: note = Synthetic polypeptide representing artificial human antibody CDR-L3 region
QSNDISLSGSVV

SEQ ID NO: 2112 - protein, 11 aa, synthetic construct
  REGION 1..11: note = Synthetic polypeptide representing artificial human antibody CDR-L3 region
QSYDNSLSGGV

SEQ ID NO: 2113 - protein, 9 aa, synthetic construct
  REGION 1..9: note = Synthetic polypeptide representing artificial human antibody CDR-L3 region
QQFDISPFT

SEQ ID NO: 2114 - protein, 10 aa, synthetic construct
  REGION 1..10: note = Synthetic polypeptide representing artificial human antibody CDR-L3 region
SSYTSSSSLV

SEQ ID NO: 2115 - protein, 10 aa, synthetic construct
  REGION 1..10: note = Synthetic polypeptide representing artificial human antibody CDR-L3 region
CSFTGTSTFV

SEQ ID NO: 2116 - protein, 9 aa, synthetic construct
  REGION 1..9: note = Synthetic polypeptide representing artificial human antibody CDR-L3 region
QQYYSTPYT

SEQ ID NO: 2117 - protein, 11 aa, synthetic construct
  REGION 1..11: note = Synthetic polypeptide representing artificial human antibody CDR-L3 region
ATWDDSLNGGV

SEQ ID NO: 2118 - protein, 9 aa, synthetic construct
  REGION 1..9: note = Synthetic polypeptide representing artificial human antibody CDR-L3 region
WLISGGAPV

SEQ ID NO: 2119 - protein, 11 aa, synthetic construct
  REGION 1..11: note = Synthetic polypeptide representing artificial human antibody CDR-L3 region
QSFDSSLSRSV

SEQ ID NO: 2120 - protein, 9 aa, synthetic construct
  REGION 1..9: note = Synthetic polypeptide representing artificial human antibody CDR-L3 region
QQRNNWPIT

SEQ ID NO: 2121 - protein, 9 aa, synthetic construct
  REGION 1..9: note = Synthetic polypeptide representing artificial human antibody CDR-L3 region
LQDYNYPPT

SEQ ID NO: 2122 - protein, 11 aa, synthetic construct
  REGION 1..11: note = Synthetic polypeptide representing artificial human antibody CDR-L3 region
NSRDSSGHHWV

SEQ ID NO: 2123 - protein, 9 aa, synthetic construct
  REGION 1..9: note = Synthetic polypeptide representing artificial human antibody CDR-L3 region
QQYYSTPYT

SEQ ID NO: 2124 - protein, 10 aa, synthetic construct
  REGION 1..10: note = Synthetic polypeptide representing artificial human antibody CDR-L3 region
MQGAHWPPIT

SEQ ID NO: 2125 - protein, 10 aa, synthetic construct
  REGION 1..10: note = Synthetic polypeptide representing artificial human antibody CDR-L3 region
YSTDTIGNWV

SEQ ID NO: 2126 - protein, 11 aa, synthetic construct
  REGION 1..11: note = Synthetic polypeptide representing artificial human antibody CDR-L3 region
QVWDSSSDHWI

SEQ ID NO: 2127 - protein, 9 aa, synthetic construct
  REGION 1..9: note = Synthetic polypeptide representing artificial human antibody CDR-L3 region
QQSYSPPLT

SEQ ID NO: 2128 - protein, 10 aa, synthetic construct
  REGION 1..10: note = Synthetic polypeptide representing artificial human antibody CDR-L3 region
QHYSDWRALT

SEQ ID NO: 2129 - protein, 9 aa, synthetic construct
  REGION 1..9: note = Synthetic polypeptide representing artificial human antibody CDR-L3 region
QQYYGPLWT

SEQ ID NO: 2130 - protein, 11 aa, synthetic construct
  REGION 1..11: note = Synthetic polypeptide representing artificial human antibody CDR-L3 region
QSADSSLTYWL

SEQ ID NO: 2131 - protein, 8 aa, synthetic construct
  REGION 1..8: note = Synthetic polypeptide representing artificial human antibody CDR-L3 region
QQYSDYST

SEQ ID NO: 2132 - protein, 9 aa, synthetic construct
  REGION 1..9: note = Synthetic polypeptide representing artificial human antibody CDR-L3 region
HQYYTTPFT

SEQ ID NO: 2133 - protein, 9 aa, synthetic construct
  REGION 1..9: note = Synthetic polypeptide representing artificial human antibody CDR-L3 region
QAWDSSTAE

SEQ ID NO: 2134 - protein, 11 aa, synthetic construct
  REGION 1..11: note = Synthetic polypeptide representing artificial human antibody CDR-L3 region
VTWDDDLHGWV

SEQ ID NO: 2135 - protein, 13 aa, synthetic construct
  REGION 1..13: note = Synthetic polypeptide representing artificial human antibody CDR-L3 region
ATWDSSLRAGPVV

SEQ ID NO: 2136 - protein, 9 aa, synthetic construct
  REGION 1..9: note = Synthetic polypeptide representing artificial human antibody CDR-L3 region
QQYNAYPVT

SEQ ID NO: 2137 - protein, 9 aa, synthetic construct
  REGION 1..9: note = Synthetic polypeptide representing artificial human antibody CDR-L3 region
QQYYSTPWT

SEQ ID NO: 2138 - protein, 9 aa, synthetic construct
  REGION 1..9: note = Synthetic polypeptide representing artificial human antibody CDR-L3 region
QQYYSPPLT

SEQ ID NO: 2139 - protein, 10 aa, synthetic construct
  REGION 1..10: note = Synthetic polypeptide representing artificial human antibody CDR-L3 region
CSYTSSLTYV

SEQ ID NO: 2140 - protein, 9 aa, synthetic construct
  REGION 1..9: note = Synthetic polypeptide representing artificial human antibody CDR-L3 region
MQGTHWPYT

SEQ ID NO: 2141 - protein, 9 aa, synthetic construct
  REGION 1..9: note = Synthetic polypeptide representing artificial human antibody CDR-L3 region
QAWDSSTYV

SEQ ID NO: 2142 - protein, 10 aa, synthetic construct
  REGION 1..10: note = Synthetic polypeptide representing artificial human antibody CDR-L3 region
QQYGGSPLFT

SEQ ID NO: 2143 - protein, 9 aa, synthetic construct
  REGION 1..9: note = Synthetic polypeptide representing artificial human antibody CDR-L3 region
QTWDSSTVI

SEQ ID NO: 2144 - protein, 9 aa, synthetic construct
  REGION 1..9: note = Synthetic polypeptide representing artificial human antibody CDR-L3 region
MQALQTPYT

SEQ ID NO: 2145 - protein, 11 aa, synthetic construct
  REGION 1..11: note = Synthetic polypeptide representing artificial human antibody CDR-L3 region
GTWDSSLSAGV

SEQ ID NO: 2146 - protein, 8 aa, synthetic construct
  REGION 1..8: note = Synthetic polypeptide representing artificial human antibody CDR-L3 region
QQYNSYWT

SEQ ID NO: 2147 - protein, 9 aa, synthetic construct
  REGION 1..9: note = Synthetic polypeptide representing artificial human antibody CDR-L3 region
QQYNSYPWT

SEQ ID NO: 2148 - protein, 12 aa, synthetic construct
  REGION 1..12: note = Synthetic polypeptide representing artificial human antibody CDR-L3 region
QSYDSSLSGSGV

SEQ ID NO: 2149 - protein, 10 aa, synthetic construct
  REGION 1..10: note = Synthetic polypeptide representing artificial human antibody CDR-L3 region
QSADSSGTYV

SEQ ID NO: 2150 - protein, 9 aa, synthetic construct
  REGION 1..9: note = Synthetic polypeptide representing artificial human antibody CDR-L3 region
QQAHGFPIT

SEQ ID NO: 2151 - protein, 8 aa, synthetic construct
  REGION 1..8: note = Synthetic polypeptide representing artificial human antibody CDR-L3 region
QQYNSWPA

SEQ ID NO: 2152 - protein, 9 aa, synthetic construct
  REGION 1..9: note = Synthetic polypeptide representing artificial human antibody CDR-L3 region
QQSYNTPYT

SEQ ID NO: 2153 - protein, 9 aa, synthetic construct
  REGION 1..9: note = Synthetic polypeptide representing artificial human antibody CDR-L3 region
QQSYNTPLT

SEQ ID NO: 2154 - protein, 10 aa, synthetic construct
  REGION 1..10: note = Synthetic polypeptide representing artificial human antibody CDR-L3 region
QQYGSSPPNS

SEQ ID NO: 2155 - protein, 11 aa, synthetic construct
  REGION 1..11: note = Synthetic polypeptide representing artificial human antibody CDR-L3 region
QVWDSSSDHPV

SEQ ID NO: 2156 - protein, 10 aa, synthetic construct
  REGION 1..10: note = Synthetic polypeptide representing artificial human antibody CDR-L3 region
QSYDSNTHWV

SEQ ID NO: 2157 - protein, 9 aa, synthetic construct
  REGION 1..9: note = Synthetic polypeptide representing artificial human antibody CDR-L3 region
MQALETPRT

SEQ ID NO: 2158 - protein, 8 aa, synthetic construct
  REGION 1..8: note = Synthetic polypeptide representing artificial human antibody CDR-L3 region
QQYNSYST

SEQ ID NO: 2159 - protein, 9 aa, synthetic construct
  REGION 1..9: note = Synthetic polypeptide representing artificial human antibody CDR-L3 region
MQALQPPYT

SEQ ID NO: 2160 - protein, 10 aa, synthetic construct
  REGION 1..10: note = Synthetic polypeptide representing artificial human antibody CDR-L3 region
QQSYSTPPWT

SEQ ID NO: 2161 - protein, 9 aa, synthetic construct
  REGION 1..9: note = Synthetic polypeptide representing artificial human antibody CDR-L3 region
QQYYLVPVT

SEQ ID NO: 2162 - protein, 12 aa, synthetic construct
  REGION 1..12: note = Synthetic polypeptide representing artificial human antibody CDR-L3 region
AAWDDSLSGPYV

SEQ ID NO: 2163 - protein, 11 aa, synthetic construct
  REGION 1..11: note = Synthetic polypeptide representing artificial human antibody CDR-L3 region
SSYAGSNNFYV

SEQ ID NO: 2164 - protein, 12 aa, synthetic construct
  REGION 1..12: note = Synthetic polypeptide representing artificial human antibody CDR-L3 region
QSYDSSLSGSMI

SEQ ID NO: 2165 - protein, 8 aa, synthetic construct
  REGION 1..8: note = Synthetic polypeptide representing artificial human antibody CDR-L3 region
MIWSSLVV

SEQ ID NO: 2166 - protein, 9 aa, synthetic construct
  REGION 1..9: note = Synthetic polypeptide representing artificial human antibody CDR-L3 region
MQALQTPWT

SEQ ID NO: 2167 - protein, 9 aa, synthetic construct
  REGION 1..9: note = Synthetic polypeptide representing artificial human antibody CDR-L3 region
LQNYNYPWT

SEQ ID NO: 2168 - protein, 9 aa, synthetic construct
  REGION 1..9: note = Synthetic polypeptide representing artificial human antibody CDR-L3 region
MQGIHLPRT

SEQ ID NO: 2169 - DNA, 662 bp, synthetic construct
  misc_feature 1..662: note = Synthetic polynucleotide encoding artificial human antibody VH chain
  source 1..662: mol_type = other DNA
gatgtgagatgcaactgttgcagtctgggggaggcctggtacagcctggggggtccctgagactctcctgtgtagcctctgaagtgacgttcaacacttatggcatgagctgggtccgccaggctccagggaaggggctggagtgggtctcatacatgagtgggggtggtggtagtatattctacgcagactccgtgaagggccggttcaccatctccagagacaattccaagaacacgctgtatctgcaaatgaacagcctgagaggcgaggacacggccgtttatttctgtgcgagggttacccttgggagttacttttacggcatggacgtctggggccaagggaccacggtcaccgtctcctcagcctccaccaagggcccatcggtcttccccctggcaccctcctccaagagcacctctgggggcacagcggccctgggctgcctggtcaaggactacttccccgaaccggtgacggtgtcgtggaactcaggcgccctgaccagcggcgtgcacaccttcccggctgtcctacagtcctcaggactctactccctcagcagcgtggtgaccgtgccctccagcagcttgggcacccagacctacatctgcaacgtgaatcacaagcccagcaacaccaaggtggacaagaaggtg

SEQ ID NO: 2170 - DNA, 660 bp, synthetic construct
  misc_feature 1..660: note = Synthetic polynucleotide encoding artificial human antibody VH chain
  source 1..660: mol_type = other DNA
gtggtgcagctggtggagtctgggggaggcttggtccagcctggggggtccctgagactctcctgtgcagcctctggattcacctttagtagctattggatgagctgggtccgccaggctccagggaaggggctggagtgggtggccaacataaagcaagatggaagtgagaaatactatgtggactctgtgaagggccgattcaccatctccagagacaacgccaagaagtcactgtatctgcaaatgaacagcctgagagccgaggacacggctgtctattactgtgcgagagatgggggatcagggagttacttcgactgctttgactactggggccagggaaccctggtcaccgtctcctcagcctccaccaagggcccatcggtcttccccctggcaccctcctccaagagcacctctgggggcacagcggccctgggctgcctggtcaaggactacttccccgaaccggtgacggtgtcgtggaactcaggcgccctgaccagcggcgtgcacaccttcccggctgtcctacagtcctcaggactctactccctcagcagcgtggtgaccgtgccctccagcagcttgggcacccagacctacatctgcaacgtgaatcacaagcccagcaacaccaaggtggacaagagtgag

SEQ ID NO: 2171 - DNA, 669 bp, synthetic construct
  misc_feature 1..669: note = Synthetic polynucleotide encoding artificial human antibody VH chain
  source 1..669: mol_type = other DNA
gaagtgcagttggtggagtctgggggaggcctgatacagcctggcaggtccctgagactctcctgtgcagcctctggattcacctttgaagattatgccatgcactgggtccggcaagctccagggaagggcctggagtgggtctcaggtattagttggaacagtgggaacataggctatgcggactctgtgaagggccgattcaccatctccagagacaacgccaagaactccctgtatctgcaaatgcacagtctgagacctgaggacacggccttatattactgtgcaaaagatataaacttttttgggttagggacagggggaggtgctatggacgtctggggccaagggaccacggtcaccgtctcctcagcctccaccaagggcccatcggtcttccccctggcaccctcctccaagagcacctctgggggcacagcggccctgggctgcctggtcaaggactacttccccgaaccggtgacggtgtcgtggaactcaggcgccctgaccagcggcgtgcacaccttcccggctgtcctacagtcctcaggactctactccctcagcagcgtggtgaccgtgccctccagcagcttgggcacccagacctacatctgcaacgtgaatcacaagcccagcaacaccaaggtggacaagagagag

SEQ ID NO: 2172 - DNA, 360 bp, synthetic construct
  misc_feature 1..360: note = Synthetic polynucleotide encoding artificial human antibody VH chain
  source 1..360: mol_type = other DNA
cccagatcaccttgaaggagtctggtcctacgctggtgaaacccacacagaccctcacgctgacctgcaccttctctgggttctcactcagcactagtggagtgggtgtgggctggatccgtcagcccccaggaaaggccctggagtggcttgcactcatttattgggatgatgataagcgctacagcccatctctgaagagcaggctcaccatcaccaaggacacctccaaaaaccaggtggtccttacaatgaccaacatggaccctgtggacacagccacatattactgtgcacacagagcaatagtaggactctttgactactggggccagggaaccctggtcaccgtctcctcag

SEQ ID NO: 2173 - DNA, 669 bp, synthetic construct
  misc_feature 1..669: note = Synthetic polynucleotide encoding artificial human antibody VH chain
  source 1..669: mol_type = other DNA
caggtgcagctggtgcagtctggggctgaggttaagaagcctggggcctcagtgaagatttcctgcaagacatctggatataccttcaccacctactatatgcactgggtgcgacaggcccctggacaggggcttgagtggatgggaataatcaacactagtggtggaagcacaagctacgcacagaagttccagggcagagtcaccatgaccagggacacgtccacgaacacagtctacatggagctgagcagcctgagatatgaagacacggccatgtattactgtgcgcgaggaggggatgggggaccccaagatgcttttgatatctggggccaagggacaaaggtcaccgtctcctcagcatccccgaccagccccaaggtcttcccgctgagcctctgcagcacccagccagatgggaacgtggtcatcgcctgcctggtccagggcttcttcccccaggagccactcagtgtgacctggagcgaaagcggacagggcgtgaccgccagaaacttcccacccagccaggatgcctccggggacctgtacaccacgagcagccagctgaccctgccggccacacagtgcctagccggcaagtccgtgacatgccacgtgaagcactacacgaatcccagccaggatgtgactgtgccctgccca

SEQ ID NO: 2174 - DNA, 666 bp, synthetic construct
  misc_feature 1..666: note = Synthetic polynucleotide encoding artificial human antibody VH chain
  source 1..666: mol_type = other DNA
tgagtgcagctggtggactctgggggaggcttggtacagcctggcaggtccctgagactctcctgtgcagcctctggattcgtctttgatgattatgccatgcactgggtccggcaagttccagggaagggcctggagtgggtctcaggcattagttggaatagtgttagtataggctatgcggactctgtgaagggccgattcaccatctccagagacaacgccaagaattccctgtatctacaaatgaacagtctgagacctgaggacgcggccttgtattactgtgtgaagtcattttcggctgaatattactactattactacggtatggacgtctggggccaagggaccacggtcaccgtctcctcagcctccaccaagggcccatcggtcttccccctggcaccctcctccaagagcacctctgggggcacagcggccctgggctgcctggtcaaggactacttccccgaaccggtgacggtgtcgtggaactcaggcgccctgaccagcggcgtgcacaccttcccggctgtcctacagtcctcaggactctactccctcagcagcgtggtgaccgtgccctccagcagcttgggcacccagacctacatctgcaacgtgaatcacaagcccagcaacaccaaggtggacaagagtgag

SEQ ID NO: 2175 - DNA, 367 bp, synthetic construct
  misc_feature 1..367: note = Synthetic polynucleotide encoding artificial human antibody VH chain
  source 1..367: mol_type = other DNA
caggttcaactggtgcagtctggagctgaggtgaagaagcctggggcctcagtgaaggtctcctgcaaggcttctggttacacctttaccaactatggtttcagctgggtgcgacaggccccaggacaagggcttgagtggatgggacggatcaccacttacaatcgtgacacaatctatgcacagaaattccagggcagagtcaccatgaccacagatacatccacgagcacagcctatatggaactgaggagcctgagatctgacgacacggccgtgtacttctgtgcgagagttgttccaggtgactccgtctatggtgcttttgatatctggggccaggggacaatggtcaccgtctcttcag

SEQ ID NO: 2176 - DNA, 668 bp, synthetic construct
  misc_feature 1..668: note = Synthetic polynucleotide encoding artificial human antibody VH chain
  source 1..668: mol_type = other DNA
gtgaagtacaactggtggagtctgggggaggcgtggtacagcctggggggtccctgagactctcctgtacagcctctggattcacctttgatgattatgccatgcactgggtccgtcaagctccagggaagggtctggagtgggtctctcttattagtggggatggtggtggcacatactatgcagactctgtgaagggccgattcaccatctccagagacaacagcaaaaactccctgtatctgcaaatgaacagtctgagaactgaggacaccgccttgtattactgtgcaaagcggaccccgttcggggagtgggcatttgactactggggccagggaaccctggtcaccgtctcctcagcatccccgaccagccccaaggtcttcccgctgagcctctgcagcacccagccagatgggaacgtggtcatcgcctgcctggtccagggcttcttcccccaggagccactcagtgtgacctggagcgaaagcggacagggcgtgaccgccagaaacttcccacccagccaggatgcctccggggacctgtacaccacgagcagccagctgaccctgccggccacacagtgcctagccggcaagtccgtgacatgccacgtgaagcactacacgaatcccagccaggatgtgactgtgccctgcccg

SEQ ID NO: 2177 - DNA, 373 bp, synthetic construct
  misc_feature 1..373: note = Synthetic polynucleotide encoding artificial human antibody VH chain
  source 1..373: mol_type = other DNA
gaggtgcagctggtggagtctgggggaggcgtggtccagcctggggggtccctgagactctcctgtgcagcgtctggattcacttttagttactatggcatgtattgggtccgccaggctccaggcaaggggcttgagtgggtgacatttatacggtatgatggaagaaataaatactatgccgactccgtgaagggccgattcaccatctccagagacaattccaagaatacgctgtatctggaaatgaataccctgagaactgaggacacggctatgtatttctgtgcgaaagatccggggacctttagggaccatctttggagtggtgttgactactggggccagggaaccctggtcaccgtctcctccg

SEQ ID NO: 2178 - DNA, 663 bp, synthetic construct
  misc_feature 1..663: note = Synthetic polynucleotide encoding artificial human antibody VH chain
  source 1..663: mol_type = other DNA
gaagtgcaactggtggagtctgggggaggcttggtacagcctggcaggtccctgagactttcttgtgcagcctctggattcccctttggtgattatgccatgcactgggtccggcaagctccagggaagggcctggagtgggtctcaggtattggatgggacagtggtggcatcggctatgcggactctgtgaagggccgattcaccatctccagagacatcgccaagaactcgctgtatctggaaataaacagtctgagacctgacgacacggccttgtattactgtgcaaaagcggcggctacactcccctacttccgcttcgctatggacgtctggggccaggggaccccggtcaccgtctcctcagcctccaccaagggcccatcggtcttccccctggcaccctcctccaagagcacctctgggggcacagcggccctgggctgcctggtcaaggactacttccccgaaccggtgacggtgtcgtggaactcaggcgccctgaccagcggcgtgcacaccttcccggctgtcctacagtcctcaggactctactccctcagcagcgtggtgaccgtgccctccagcagcttgggcacccagacctacatctgcaacgtgaatcacaagcccagcaacaccaaggtggacaagaatgtg

SEQ ID NO: 2179 - DNA, 666 bp, synthetic construct
  misc_feature 1..666: note = Synthetic polynucleotide encoding artificial human antibody VH chain
  source 1..666: mol_type = other DNA
ccaggtctcctggtgcagtctggaggtgaggtgaagaagcctggggcctcagtgagggtctcctgcaaggcctctggttacatcgatatcaacaacggcatcagctgggtgcgacaggccccaggacacggtcttgagtggatgggatggatcagcatttacagtggtaacacaaagtatgcacagaagttccagggcagagtcaccatgaccacagcgacatccacgagcacagtctacatggagctgaggagcctgacatctgacgacacggccgtgtattactgtgcgagagtgggagtctttaagggcctggctcctttcggggggttcgacccctggggccaggggaccctggtcaccgtctcttcagcctccaccaagggcccatcggtcttccccctggcgccctgctccaggagcacctccgagagcacagcggccctgggctgcctggtcaaggactacttccccgaaccggtgacggtgtcgtggaactcaggcgccctgaccagcggcgtgcacaccttcccggctgtcctacagtcctcaggactctactccctcagcagcgtggtgaccgtgccctccagcagcttgggcacgaagacctacacctgcaatgtagatcacaagcccagcaacaccaaggtggacaagagagtt

SEQ ID NO: 2180 - DNA, 355 bp, synthetic construct
  misc_feature 1..355: note = Synthetic polynucleotide encoding artificial human antibody VH chain
  source 1..355: mol_type = other DNA
ttgttgcagttggtggagtctgggggaggcgtggtccagcctgggaggtccctgagactctcctgtgcagcctctggattcaccttcactcgccatggtttccactgggtccgccaggctccaggcaaggggctggagtgggtggcagttatatcatctgatggaaggaagatacactacacagactcagtgaagggccgattcgtcatctccagagacgattccgacaacacagtgtatctccacatgaacagcctgagacttggggacacggctctgtattactgtgcgagagacagtggtggcactccggggccctactggggccagggaaccctggtcaccgtctcctcag

SEQ ID NO: 2181 - DNA, 667 bp, synthetic construct
  misc_feature 1..667: note = Synthetic polynucleotide encoding artificial human antibody VH chain
  source 1..667: mol_type = other DNA
gtgtgaggtgcaactgttggagtctgggggaggcttggtacagcctggggggtccctgacactctcctgtgtaggctctcgattcacctttagcagctatgccatgaattgggtccgccagagtccagggaggggcctggagtgggtcgcatctatcagtgctactactggtagcacttactacacagactccgtggagggccggttcaccatctccagagacaattccagagacactctatatctgcaaatgaacagcctgagagccgatgacacggccttatattactgtgtgaggtcgttcgtcggcgcagttcccgcttatcccaactttgacttctggggcccggggaccctggtcaccgtctcctcagcctccaccaagggcccatcggtcttccccctggcgccctgctccaggagcacctccgagagcacagcggccctgggctgcctggtcaaggactacttccccgaaccggtgacggtgtcgtggaactcaggcgctctgaccagcggcgtgcacaccttcccggctgtcctacagtcctcaggactctactccctcagcagcgtggtgaccgtgacctccagcaacttcggcacccagacctacacctgcaacgtagatcacaagcccagcaacaccaaggtggacaagacagtg

SEQ ID NO: 2182 - DNA, 677 bp, synthetic construct
  misc_feature 1..677: note = Synthetic polynucleotide encoding artificial human antibody VH chain
  source 1..677: mol_type = other DNA
cacaggtacagctgcagcagtcaggtccgggactggtgaagccctcgcagaccctctcactcacctgtgccatctccggggacggtgtctctagcaacagtgctagttggaactgggtcaggcagtccccatcgagaggccttgagtggctgggaaggacatactacaggtccaagtggtataatgattatgcagtatctgtgaaaagtcgaatgaccatcaaatcagacacatccaagaaccaattctccctgcagttgaactctgtgactcccgaagacacggctgtttattactgtgtaagaggggtagtgggggctactctcgacaactggggccagggaaccctggtcaccgtctcctcagggagtgcatccgccccaacccttttccccctcgtctcctgtgagaattccccgtcggatacgagcagcgtggccgttggctgcctcgcacaggacttccttcccgactccatcactttctcctggaaatacaagaacaactctgacatcagcagcacccggggcttcccatcagtcctgagagggggcaagtacgcagccacctcacaggtgctgctgccttccaaggacgtcatgcagggcacagacgaacacgtggtgtgcaaagtccagcaccccaacggcaacaaagaaaagaacgtgcctcttccg

SEQ ID NO: 2183 - DNA, 666 bp, synthetic construct
  misc_feature 1..666: note = Synthetic polynucleotide encoding artificial human antibody VH chain
  source 1..666: mol_type = other DNA
caggtgcaattggtggaatctgggggaggcgtggtccagcctggggggtccctgagactctcctgtggagcgtctggattcgccttcagtagtaatggcatgcactgggtccgccaggctccaggcaagggactggagtgggtggcttttattcactatgatggaaggaataaacactatacagattccgtgaagggccgattcgccatctccgtagacgattccaagaccacgttgtatctgcaaatgagcagcctgaaaactgaggacacggctgtttattactgtgtgaaagattcccgggttacggggcaaagcagtggttatatctttgactcttggggccagggaaccctggtcaccgtctcctcagcctccaccaagggcccatcggtcttccccctggcgccctgctccaggagcacctccgagagcacagcggccctgggctgcctggtcaaggactacttccccgaaccggtgacggtgtcgtggaactcaggcgctctgaccagcggcgtgcacaccttcccagctgtcctacagtcctcaggactctactccctcagcagcgtggtgaccgtgccctccagcaacttcggcacccagacctacacctgcaacgtagatcacaagcccagcaacaccaaggtggacaagactgag

SEQ ID NO: 2184 - DNA, 648 bp, synthetic construct
  misc_feature 1..648: note = Synthetic polynucleotide encoding artificial human antibody VH chain
  source 1..648: mol_type = other DNA
gtggtgcagctggtggagtctgggggaggcctggtcaagcctggggggtccctgagactctcctgtgcagcctctggaatcaccttcagtagctatgacatgaactgggtccgccaggctccagggaaggggctggagtgggtctcatccattagtagtagtagtagttccatatacttcgcagactcagtgaagggccgattcaccatctccagagacaacgccaagaactcactgtatctgcacatgaacagcctgagagccgaggacacggctgtttattattgtgcgagaccccgtttaggctggtacttcgatctctggggccgtggcaccctagtcactgtcgcctcagcctccaccaagggcccatcggtcttccccctggcaccctcctccaagagcacctctgggggcacagcggccctgggctgcctggtcaaggactacttccccgaaccggtgacggtgtcgtggaactcaggcgccctgaccagcggcgtgcacaccttcccggctgtcctacagtcctcaggactctactccctcagcagcgtggtgaccgtgccctccagcagcttgggcacccagacctacatctgcaacgtgaatcacaagcccagcaacaccaaggtggacaagagagtt

SEQ ID NO: 2185 - DNA, 656 bp, synthetic construct
  misc_feature 1..656: note = Synthetic polynucleotide encoding artificial human antibody VH chain
  source 1..656: mol_type = other DNA
cccaggttcagctggtgcagtctggaggtgaggtgaagaagcctggggcctcagtgaaggtctcctgcaaggcttctggttacaactttaccaactatggtatcagctgggtgcgacaggcccctggccaagggcttgagtggatgggatggatcagcgcttacaatggtaacacgaactatgcacagaagctccagggcagagtcaccatgaccacagacacacccacgagcacagcctacatggagctgaggagcctgagatctgacgacacggccgtgtattactgtgcgagagaaaccgccgggcagctcatcccctttgactactggggccagggaaccctggtcaccgtctcctcagcctccaccaagggcccatcggtcttccccctggcaccctcctccaagagcacctctgggggcacagcggccctgggctgcctggtcaaggactacttccccgaaccggtgacggtgtcgtggaactcaggcgccctgaccagcggcgtgcacaccttcccggctgtcctacagtcctcaggactctactccctcagcagcgtggtgaccgtgccctccagcagcttgggcacccagacctacatctgcaacgtgaatcacaagcccagcaacaccaaggtggacaagagtgag

SEQ ID NO: 2186 - DNA, 666 bp, synthetic construct
  misc_feature 1..666: note = Synthetic polynucleotide encoding artificial human antibody VH chain
  source 1..666: mol_type = other DNA
gtggagcaactggtggagtctgggggaggcttggtacagcctggagggtccctgagactctcctgtgcagcctctggattcagcttcaggagttatgaaatgaactgggtccgccaggctccagggaaggggctggagtgggtttcatacattggtattggtggcaataccatatattatgcagactctgtgaagggccgattcaccatctccagagacaacgccaagaactcactgtatctgcaaatgaacagcctgagagccgaggacacggctgtttattactgtgcgagagattatatgggtgtggatttctactactactacggtatggacgtctggggccaagggaccacggtcaccgtctcctcagcctccaccaagggcccatcggtcttccccctggcaccctcctccaagagcacctctgggggcacagcggccctgggctgcctggtcaaggactacttccccgaaccggtgacggtgtcgtggaactcaggcgccctgaccagcggcgtgcacaccttcccggctgtcctacagtcctcaggactctactccctcagcagcgtggtgaccgtgccctccagcagcttgggcacccagacctacatctgcaacgtgaatcacaagcccagcaacaccaaggtggacaagagagtt

SEQ ID NO: 2187 - DNA, 657 bp, synthetic construct
  misc_feature 1..657: note = Synthetic polynucleotide encoding artificial human antibody VH chain
  source 1..657: mol_type = other DNA
caggtccagcttgtgcagtctggggctgaggtgaagaagcctggggcctcagtgaaggtttcctgcaaggcttctggatacatcttcactagctatgctatacattgggtgcgccaggcccccggacaaaggcttgagtggatgggatggatcaacgctggcaatggtaacacaaagtattcacagaagttccagggcagagtcaccattacccgggacacatccgcgaatacagcctacatggagctgagcagcctgagatctgaagacacggctatatattactgtgcgagagatatagcagtggctattactaactactttggctcctggggccagggaaccctggtcaccgtctcctcagcctccaccaagggcccatcggtcttccccctggcaccctcctccaagagcacctctgggggcacagcggccctgggctgcctggtcaaggactacttccccgaaccggtgacggtgtcgtggaactcaggcgccctgaccagcggcgtgcacaccttcccggctgtcctacagtcctcaggactctactccctcagcagcgtggtgaccgtgccctccagcagcttgggcacccagacctacatctgcaacgtgaatcacaagcccagcaacaccaaggtggacaagaaggtg

SEQ ID NO: 2188 - DNA, 648 bp, synthetic construct
  misc_feature 1..648: note = Synthetic polynucleotide encoding artificial human antibody VH chain
  source 1..648: mol_type = other DNA
caggtgcagctgcaggagtcgggcccaggactggtgaggccctcggagaccctgtccctcacctgcgatgtctctggttacttaatcagtagtggctactactggggctgggtccggcagccccccggaaagggtctggagtggattgggagcgtctatcatagtgggaatgcctactacaatccgtccctcaagggtcgagtcacaatgtcagtagatacgtcgaaaaatcagttctccctgaagttgacctctgtggccgccgaagacacggccgtctattattgtgcgagagaacatcgtagtgggtatcagcgatactggggccagggaaccctggtcaccgtctcctcagcctccaccaagggcccatcggtcttccccctggcaccctcctccaagagcacctctgggggcacagcggccctgggctgcctggtcaaggactacttccccgaaccggtgacggtgtcgtggaactcaggcgccctgaccagcggcgtgcacaccttcccggctgtcctacagtcctcaggactctactccctcagcagcgtggtgaccgtgccctccagcagcttgggcacccagacctacatctgcaacgtgaatcacaagcccagcaacaccaaggtggacaagaaagtg

SEQ ID NO: 2189 - DNA, 671 bp, synthetic construct
  misc_feature 1..671: note = Synthetic polynucleotide encoding artificial human antibody VH chain
  source 1..671: mol_type = other DNA
cccagatcaccttgaaggagtctggtcctacgctggtgaaacccacacagaccctcacgctgacctgcaccttctctgggttctcactcaacactagtggagtgggtgtgggctggatccgtcagcccccgggaaaggccctggagtggcttgcactcatttattgggatgatgatgagcgctacaggccatctctgaagaacagactcaccatcaccagggacacctccaaaaaccaggtggtccttacgatgaccaacatggaccctgtggacacagccacatattactgtgcacacttctctacggtgattaactttggccactggggccagggaaccctggtcaccgtctcctcagggagtgcatccgccccaacccttttccccctcgtctcctgtgagaattccccgtcggatacgagcagcgtggccgttggctgcctcgcacaggacttccttcccgactccatcactttctcctggaaatacaagaacaactctgacatcagcagcacccggggcttcccatcagtcctgagagggggcaagtacgcagccacctcacaggtgctgctgccttccaaggacgtcatgcagggcacagacgaacacgtggtgtgcaaagtccagcaccccaacggcaacaaagaaaagaacgtgcctcttcca

SEQ ID NO: 2190 - DNA, 346 bp, synthetic construct
  misc_feature 1..346: note = Synthetic polynucleotide encoding artificial human antibody VH chain
  source 1..346: mol_type = other DNA
gaggtgcagctggtggagtctgggggaggcctggtcaagccgggggggtccctcagactgtcctgtgtcggctctggattcaccttcagcaactatagcatgaactgggtccgccaggctccagggagggggcttgagtgggtctcttcaattagttggggtagttcttacataaactacgcagactcagtgaagggccgattcaccatctccagagacaacgccaagaactcactatatctgcagatgaccagcctgaccgccgaggacacggctgtctattactgtgcgtgccgacggatatatcaggggttcgacccctggggccagggaaccctggtcaccg

SEQ ID NO: 2191 - DNA, 645 bp, synthetic construct
  misc_feature 1..645: note = Synthetic polynucleotide encoding artificial human antibody VH chain
  source 1..645: mol_type = other DNA
gaggtgcagctggtggagtctgggggaggcctggtcaagcctggggggtccctgagactctcctgtgcagcctctggattcaccttcagtagctatagcatgaactgggtccgccaggctccagggaaggggctggagtgggtctcatcgattagtagcagtagtaggtacatatactacgcagactcagtgaagggccgattcaccagctccagagacaacgccaagaactcactgtatctgcaaatgaacagcctgagagccgaggacacggctgtgtattactgtgcgagagatcgagctacctcgtttgattactggggccagggaaccctggtcaccgtctcctcagcctccaccaagggcccatcggtcttccccctggcaccctcctccaagagcacctctgggggcacagcggccctgggctgcctggtcaaggactacttccccgaaccggtgacggtgtcgtggaactcaggcgccctgaccagcggcgtgcacaccttcccggctgtcctacagtcctcaggactctactccctcagcagcgtggtgaccgtgccctccagcagcttgggcacccagacctacatctgcaacgtgaatcacaagcccagcaacaccaaggtggacaagaaggtg

SEQ ID NO: 2192 - DNA, 639 bp, synthetic construct
  misc_feature 1..639: note = Synthetic polynucleotide encoding artificial human antibody VH chain
  source 1..639: mol_type = other DNA
ccggtgcttctgcaggagtcgggcccaggactggtgaagccttcggagaccctgtccctcacctgcactgtctctggtgactccatgagtttttactattggacctggatccggcagcccccagggaagggactggaatggattggatatatctattacagtgggaacaggaactacaatccctccctcaacagtcgagtcaccatatctgtagacacgtccaagaacgaggtctccctgaagctgacgtctgtgacagctgcggacacggccgcgtattactgtgcgagaggtcggggggaaatggacgtctggggccaagggaccacggtcaccgtctcctcagcctccaccaagggcccatcggtcttccccctggcaccctcctccaagagcacctctgggggcacagcggccctgggctgcctggtcaaggactacttccccgaaccggtgacggtgtcgtggaactcaggcgccctgaccagcggcgtgcacaccttcccggctgtcctacagtcctcaggactctactccctcagcagcgtggtgaccgtgccctccagcagcttgggcacccagacctacatctgcaacgtgaatcacaagcccagcaacaccaaggtggacaagagagtt

SEQ ID NO: 2193 - DNA, 660 bp, synthetic construct
  misc_feature 1..660: note = Synthetic polynucleotide encoding artificial human antibody VH chain
  source 1..660: mol_type = other DNA
caggtgcagctgcaggagtcgggcccaggactggtgaagcccacacagaccctgtccctcacctgcactgtctctggtggctccatcagcagtggtagttactactggaactggatccggcagcccgccgggaagggactggagtggattgggaacatctataccagtgggaataccgactacaacccctccctcaagagtcgagtcaccatatctctagacacgtccaagaaccaggtctccctgaatttgacttctgtgaccgccgcagacacggccgtgtattactgtgcgactacccctagcagcagctggtactggtacttcgacccctggggccagggaaccctggtcaccgtctcctcagcctccaccaagggcccatcggtcttccccctggcaccctcctccaagagcacctctgggggcacagcggccctgggctgcctggtcaaggactacttccccgaaccggtgacggtgtcgtggaactcaggcgccctgaccagcggcgtgcacaccttcccggctgtcctacagtcctcaggactctactccctcagcagcgtggtgaccgtgccctccagcagcttgggcacccagacctacatctgcaacgtgaatcacaagcccagcaacaccaaggtggacaagagtgag

SEQ ID NO: 2194 - DNA, 663 bp, synthetic construct
  misc_feature 1..663: note = Synthetic polynucleotide encoding artificial human antibody VH chain
  source 1..663: mol_type = other DNA
gaggtgcagttggtggagtctgggggaggcctggtcaagccgggggggtccctgagactctcctgtgcaggctctggatttagtttcagtagttatagcatgaactgggtccggcaggctccagggaaggggctggagtgggtctcatccattagtagtaaaagtagttccaaaaactacatagactctgtgaagaaccgattcatcatctccagagacaacgccaagaactcgctgtatctgcagatgaacagcctgagagccgaggacacggctgtgtattactgtgcgagagatcttgaacttattattgcagcaggtgctccccttgaccactggggccagggaaccctggtcaccgtctcctcagcctccaccaagggcccatcggtcttccccctggcaccctcctccaagagcacctctgggggcacagcggccctgggctgcctggtcaaggactacttccccgaaccggtgacggtgtcgtggaactcaggcgccctgaccagcggcgtgcacaccttcccggctgtcctacagtcctcaggactctactccctcagcagcgtggtgaccgtgccctccagcagcttgggcacccagacctacatctgcaacgtgaatcacaagcccagcaacaccaaggtggacaagagagag

SEQ ID NO: 2195 - DNA, 666 bp, synthetic construct
  misc_feature 1..666: note = Synthetic polynucleotide encoding artificial human antibody VH chain
  source 1..666: mol_type = other DNA
cccctgcagctgcaggagtcgggcccaggactggtgaagccttcggagaccctgtccctcacctgcactgtctctggtggctccatcagcagaagtccttacttctggggctggatccgccagcccccagggaggggcctggagtggatcgcgagtatctattatagagggaccacctcttacaacccgtccctcaagagtcgagtgaccatctcagtagacacgtctaagaaccagttctccctgaaactgaggtctgtgaccgccgcggacacggccgtgttttattgtgcgagactggtaacatcacctgaagaagggggtccctggttcgacccctggggccggggaaccctggtcaccgtctcctcagcctccaccaagggcccatcggtcttccccctggcaccctcctccaagagcacctctgggggcacagcggccctgggctgcctggtcaaggactacttccccgaaccggtgacggtgtcgtggaactcaggcgccctgaccagcggcgtgcacaccttcccggctgtcctacagtcctcaggactctactccctcagcagcgtggtgaccgtgccctccagcagcttgggcacccagacctacatctgcaacgtgaatcacaagcccagcaacaccaaggtggacaagaaagtg

SEQ ID NO: 2196 - DNA, 358 bp, synthetic construct
  misc_feature 1..358: note = Synthetic polynucleotide encoding artificial human antibody VH chain
  source 1..358: mol_type = other DNA
caggtgcagctggtggagtctgggggaggcgtggtccagcctgggaggtccctgagactctcctgtgcagcgtctggattcaccttcactagttatggcatgcactgggtccgccaggctcctggcaaggggctggagtgggtggcacttatctggtatgatggaagtaataaatactatgcagactccgtgaagggccgattcaccatctccagagacaattccaagaacacgctgtatctacaaatgaacagcctgagagccgaggacacggctgtgtattactgtgcgagagatacggaagtggggcatcactttgactactggggccagggaaccctgatcaccgtctcctcag

SEQ ID NO: 2197 - DNA, 659 bp, synthetic construct
  misc_feature 1..659: note = Synthetic polynucleotide encoding artificial human antibody VH chain
  source 1..659: mol_type = other DNA
cccaggtgcagctgcaggagtcgggcccaggactggtgaagccttcggagaccctgtccctcacctgcactgtctctagtggctccagtggtagttattacttgagctggatccggcagcccgccgggaagggactggagtggatcgggcgtatgtacaccagtgggagcacccactacaacccctccctcaagagtcgagtcaccatgtcagtagacacgtccaagaaccagttctccctgaagttgagttctgtgacggccgcggacacggccgtctattactgtgcgaagccctggagaagtgatggttttgatgtctggggccaagggacggtggtcaccgtctcttcagcatccccgaccagccccaaggtcttcccgctgagcctctgcagcacccagccagatgggaacgtggtcatcgcctgcctggtccagggcttcttcccccaggagccactcagtgtgacctggagcgaaagcggacagggcgtgaccgccagaaacttcccacccagccaggatgcctccggggacctgtacaccacgagcagccagctgaccctgccggccacacagtgcctagccggcaagtccgtgacatgccacgtgaagcactacacgaatcccagccaggatgtgactgtgccctgccct

SEQ ID NO: 2198 - DNA, 650 bp, synthetic construct
  misc_feature 1..650: note = Synthetic polynucleotide encoding artificial human antibody VH chain
  source 1..650: mol_type = other DNA
cccaggtgcagctggtgcagtctggggctgaggtgaagaagcctggggcctcagtgaaggtctcctgcaaggcttctggatacaacttcagggactactatatgcactgggtgcggcaggcccctggacaaggccttgagtggatgggatggatcaaccctaatagtggtggcacaatctctgcacagaactttcagggccgggtcaccatgaccagggacacctccatcagcacagcctacatggaggtaaacagcctgagatctgacgacacggccgtatattattgtgcagtgggcatggttacagatggttttgaaatctggggccaagggacattggtcaccgtctcttcagcctccaccaagggcccatcggtcttccccctggcaccctcctccaagagcacctctgggggcacagcggccctgggctgcctggtcaaggactacttccccgaaccggtgacggtgtcgtggaactcaggcgccctgaccagcggcgtgcacaccttcccggctgtcctacagtcctcaggactctactccctcagcagcgtggtgaccgtgccctccagcagcttgggcacccagacctacatctgcaacgtgaatcacaagcccagcaacaccaaggtggacaagagagtt

SEQ ID NO: 2199 - DNA, 668 bp, synthetic construct
  misc_feature 1..668: note = Synthetic polynucleotide encoding artificial human antibody VH chain
  source 1..668: mol_type = other DNA
cccaggtgcagctgcaggagtcgggctcaggactggtgaggccttcacagaccctgtccctcacctgcactgtctctggtggctccatcaacagtggtgattaccactggagttggatccgccagccccccgggaaggacctggagtatattggatatatccatcacactgggagcgcctactacaacccgtccctcaagagtcgagttaccatatcagtagacacgtccaagaaccaacactctctgaggctgacttctgtgactgccgcagacacggccgtgtattattgtgccaggctggatttgcggaccgtgaggttcgacccctggggccaggggaccctggtcaccgtctcctcagcatccccgaccagccccaaggtcttcccgctgagcctctgcagcacccagccagatgggaacgtggtcatcgcctgcctggtccagggcttcttcccccaggagccactcagtgtgacctggagcgaaagcggacagggcgtgaccgccagaaacttcccacccagccaggatgcctccggggacctgtacaccacgagcagccagctgaccctgccggccacacagtgcctagccggcaagtccgtgacatgccacgtgaagcactacacgaatcccagccaggatgtgactgtgccctgccca

SEQ ID NO: 2200 - DNA, 678 bp, synthetic construct
  misc_feature 1..678: note = Synthetic polynucleotide encoding artificial human antibody VH chain
  source 1..678: mol_type = other DNA
cccctgcagctgcaggagtcgggcccaggactggcgaagccttcggagaccctgtccctcacctgcactgcctctggtggctccatcagcagtagtggttactactggggctggatccgccagcccccagggaaggggctggagtggattgggagtatctattatagtggggacacctactacaacccgtccctgaagagtcgagtcaacatagccgtagacacgtcccagaaccagttctccctgaagttgaactctgtgaccgccgctgatacggctgtatattactgtgcgagacatagcagtggccccccccggctcgcttttgatatctggggccaagggacaatggtcaccgtctcttcagggagtgcatccgccccaacccttttccccctcgtctcctgtgagaattccccgtcggatacgagcagcgtggccgttggctgcctcgcacaggacttccttcccgactccatcactttctcctggaaatacaagaacaactctgacatcagcagcacccggggcttcccatcagtcctgagagggggcaagtacgcagccacctcacaggtgctgctgccttccaaggacgtcatgcagggcacagacgaacacgtggtgtgcaaagtccagcaccccaacggcaacaaagaaaagaacgtgcctcttccg

SEQ ID NO: 2201 - DNA, 654 bp, synthetic construct
  misc_feature 1..654: note = Synthetic polynucleotide encoding artificial human antibody VH chain
  source 1..654: mol_type = other DNA
caggtgcagctggtggagtctgggggaggcgtggtccagcctgggaggtccctgagactctcctgtgcagcctctggattcaccttcagtagctatggcatgcactgggtccgccaggttccaggcaaggggctggagggggtggcagttatatcacatgatggaagtaataaatattatgcagactccgtgaagggccgattcaccatctccagagacaattccaagaatacgctgtacctgcaaatgaacagcctgagagttgaggacacggctgtgtattattgtgcgaaagatttcgctatgcctacagtaactacggactactggggccagggaaccctggtcaccgtctcctcagcctccaccaagggcccatcggtcttccccctggcaccctcctccaagagcacctctgggggcacagcggccctgggctgcctggtcaaggactacttccccgaaccggtgacggtgtcgtggaactcaggcgccctgaccagcggcgtgcacaccttcccggctgtcctacagtcctcaggactctactccctcagcagcgtggtgaccgtgccctccagcagcttgggcacccagacctacatctgcaacgtgaatcacaagcccagcaacaccaaggtggacaagaatgag

SEQ ID NO: 2202 - DNA, 364 bp, synthetic construct
  misc_feature 1..364: note = Synthetic polynucleotide encoding artificial human antibody VH chain
  source 1..364: mol_type = other DNA
cagatcaccttgaaggagtctggtcctacgctggtgaaacccacacagaccctcacgctgacctgcaccttctctgggttctcactcaccactagtggagtgggtgtgggctggatccgtcagcccccaggaaaggccctggagtggcttgcactcatttattgggatgatgataagcgctacagtccatctctgaggagtagactcaccatcaccaaggacacctccaaaaaccaggtggtccttacaatgaccaacatggaccctgtggacacagccacatattattgtgtacacagaccatccctggcctattggtacttcgatgtctggggccgtggcaccctgctcactgtctcctcag

SEQ ID NO: 2203 - DNA, 657 bp, synthetic construct
  misc_feature 1..657: note = Synthetic polynucleotide encoding artificial human antibody VH chain
  source 1..657: mol_type = other DNA
gtggtacagttggtggagtctgggggaggcttggtccagcctggagggtccctgagactctcctgtgcagcctctggattcaccttcagtacatatgaactaaactgggtccggcaggctccagggaaggggctggagtggatttcatacattaatactactagtgatcccatatactacgcagactctgtgaagggccgattcaccatctccagagacaacgccaagaattcagtgtttctgcaaatgaacagcctgagagccgaggacacggctgtttactactgcgtgagagagggtgattcacggaaatattatagtcttgactattggggccagggaaccctggtcaccgtctcctcagcctccaccaagggcccatcggtcttccccctggcaccctcctccaagagcacctctgggggcacagcggccctgggctgcctggtcaaggactacttccccgaaccggtgacggtgtcgtggaactcaggcgccctgaccagcggcgtgcacaccttcccggctgtcctacagtcctcaggactctactccctcagcagcgtggtgaccgtgccctccagcagcttgggcacccagacctacatctgcaacgtgaatcacaagcccagcaacaccaaggtggacaagagagtt

SEQ ID NO: 2204 - DNA, 654 bp, synthetic construct
  misc_feature 1..654: note = Synthetic polynucleotide encoding artificial human antibody VH chain
  source 1..654: mol_type = other DNA
ccggtgcagctggtgcagtctggggctgaggtgaagaagcctgggtcctcggtgaaggtctcctgcaaggcttctggaggcaccttcagcagctatgctatcagctgggtgcgacaggcccctggacaagggcttgagtggatgggagggatcatccctatctttggtacagcaaactacgcacagaagttccagggcagagtcacgattaccgcggacgaatccacgagcacagcctacatggagctgagcagcctgagatctgaggacacggccgtgtattactgtgcgagagatccaatgtgggtctcttatgcttttgatatctggggccaagggacaatggtcaccgtctcttcagcctccaccaagggcccatcggtcttccccctggcaccctcctccaagagcacctctgggggcacagcggccctgggctgcctggtcaaggactacttccccgaaccggtgacggtgtcgtggaactcaggcgccctgaccagcggcgtgcacaccttcccggctgtcctacagtcctcaggactctactccctcagcagcgtggtgaccgtgccctccagcagcttgggcacccagacctacatctgcaacgtgaatcacaagcccagcaacaccaaggtggacaagaatgag

SEQ ID NO: 2205 - DNA, 645 bp, synthetic construct
  misc_feature 1..645: note = Synthetic polynucleotide encoding artificial human antibody VH chain
  source 1..645: mol_type = other DNA
cccgtgcagctgcaggagtcgggcccaggactggtgaagccttcggagaccctgtccctcacctgcactgtctctggtggctccatcagcagtgataattactactggagctggctccgccagcacccagggaagggcctggagtggattgggtacatctatttcagtgtgaccacctactacaacccgtccctcaagagtcgagttaccatatcactagacacgtctaagaaccagttctccctgaagctgagctctgtgactgccgcggacacggccgtgtattactgtgcgagtggttatgtttctttcgatctctggggccagggaaccctggtcaccgtctcctcagcctccaccaagggcccatcggtcttccccctggcaccctcctccaagagcacctctgggggcacagcggccctgggctgcctggtcaaggactacttccccgaaccggtgacggtgtcgtggaactcaggcgccctgaccagcggcgtgcacaccttcccggctgtcctacagtcctcaggactctactccctcagcagcgtggtgaccgtgccctccagcagcttgggcacccagacctacatctgcaacgtgaatcacaagcccagcaacaccaaggtggacaagagagtt

SEQ ID NO: 2206 - DNA, 662 bp, synthetic construct
  misc_feature 1..662: note = Synthetic polynucleotide encoding artificial human antibody VH chain
  source 1..662: mol_type = other DNA
cccaggtgcagctgcaggagtcgggcccaggactggtgaagccttcggagaccctgtccctcacctgcaatgtctctggtgcctccatcagtagttactactggagttggatccggcagcccccagggaagggactggagtggattggttatctctcttacagtgggaacaccaactccaaaccctccctcaagagtcgagtcaccatatcagtagacacgtccaagaaccagttctccctgaaactgagctctgtgaccgctgcggacacggccgtgtattactgtgcgagagagggggcctatgagagtagtggacctgatccttttgatatctggggccaagggacaatggtcaccgtctcttcagcctccaccaagggcccatcggtcttccccctggcaccctcctccaagagcacctctgggggcacagcggccctgggctgcctggtcaaggactacttccccgaaccggtgacggtgtcgtggaactcaggcgccctgaccagcggcgtgcacaccttcccggctgtcctacagtcctcaggactctactccctcagcagcgtggtgaccgtgccctccagcagcttgggcacccagacctacatctgcaacgtgaatcacaagcccagcaacaccaaggtggacaagagagtt

SEQ ID NO: 2207 - DNA, 662 bp, synthetic construct
  misc_feature 1..662: note = Synthetic polynucleotide encoding artificial human antibody VH chain
  source 1..662: mol_type = other DNA
cccaggtccaggttgtgcagtctggggctgaggtgaagaagcctggggcctcagtgaagatttcctgcaaggcttctggaaacaccttcactacctatactatacagtgggtgcgccaggtccccggacaaaggcttgagtggatgggatggatcaacgctggcaatggtgacataaaatattcacagaagttccaagacagagtcaccattaccagggacacatccgcgaacacagcctacatggagctgagcagcctgagatatgaagacacggctgtatatttctgtgcgagcctctttctaacatactatggttcggggacttattatcgctggggccagggaaccctggtcaccgtctcctcagcctccaccaagggcccatcggtcttccccctggcaccctcctccaagagcacctctgggggcacagcggccctgggctgcctggtcaaggactacttccccgaaccggtgacggtgtcgtggaactcaggcgccctgaccagcggcgtgcacaccttcccggctgtcctacagtcctcaggactctactccctcagcagcgtggtgaccgtgccctccagcagcttgggcacccagacctacatctgcaacgtgaatcacaagcccagcaacaccaaggtggacaagagtgag

SEQ ID NO: 2208 - DNA, 648 bp, synthetic construct
  misc_feature 1..648: note = Synthetic polynucleotide encoding artificial human antibody VH chain
  source 1..648: mol_type = other DNA
gaggtgcagctgttggagtctgggggaggcttggtacagcctggggggtccctgagactctcctgtgcagcctctggattcacctttagcagctatgccatgagctgggtccgccaggctccagggaaggggctggagtgggtctcaactattagtggtagtggtcatagcacatactacgcagactccgtgaagggccggttcaccatctccagagacaattccaagaacacgctgtatctgcaaatgaacagcctgagagccgaggacacggccgtatattactgtgcgaaatcgaccctcggtggtggttttgacttctggggccagggaaccctggtcaccgtctcctcagcctccaccaagggcccatcggtcttccccctggcaccctcctccaagagcacctctgggggcacagcagccctgggctgcctggtcaaggactacttccccgaaccggtgacggtgtcgtggaactcaggcgccctgaccagcggcgtgcacaccttcccggctgtcctacagtcctcaggactctactccctcagcagcgtggtgaccgtgccctccagcagcttgggcacccagacctacatctgcaacgtgaatcacaagcccagcaacaccaaggtggacaagaaagtt

SEQ ID NO: 2209 - DNA, 669 bp, synthetic construct
  misc_feature 1..669: note = Synthetic polynucleotide encoding artificial human antibody VH chain
  source 1..669: mol_type = other DNA
gtggtgcagctggtggagtctgggggaggtgtggtacggcctggggggtccctgagactctcctgtgcagcctctggattcacctttgatgattatggcatgagctgggtccgccaagctccagggaaggggctggagtgggtctctggtattaattggaatggtggtagcacaggttatgcagactctgtgaagggccgattcaccatctccagagacaacgccaagaactccctgtatctgcaaatgaacagtctgagagccgaggacacggccttgtatcactgtgcgagagttggtagcagcagctggtacagctccgggcgatccccttttgactactggggccagggaaccctggtcaccgtctcctcagcctccaccaagggcccatcggtcttccccctggcaccctcctccaagagcacctctgggggcacagcggccctgggctgcctggtcaaggactacttccccgaaccggtgacggtgtcgtggaactcaggcgccctgaccagcggcgtgcacaccttcccggctgtcctacagtcctcaggactctactccctcagcagcgtggtgaccgtgccctccagcagcttgggcacccagacctacatctgcaacgtgaatcacaagcccagcaacaccaaggtggacaagagagtt

SEQ ID NO: 2210 - DNA, 663 bp, synthetic construct
  misc_feature 1..663: note = Synthetic polynucleotide encoding artificial human antibody VH chain
  source 1..663: mol_type = other DNA
caggtgcagctggtggagtctgggggaggcgtggtccagcctgggaggtccctgagactctcctgtgcagcctctggattcaccttcagtagctatggcatgcactgggtccgccaggctccaggcaaggggctggagtgggtggcagttatatcatatgatggaagtaataaatactatgcagactccgtgaagggccgattcaccatctccagagacaattccaagaacacgctgtatctgcaaatgaacagcctgagagctgaggacacggctgtgtattactgtgcgaaagatcaaatcgtcctagagatggctacaagcccctttgactactggggccagggaaccctggtcaccgtctcctcagcctccaccaagggcccatcggtcttccccctggcgccctgctccaggagcacctccgagagcacagcggccctgggctgcctggtcaaggactacttccccgaaccggtgacggtgtcgtggaactcaggcgctctgaccagcggcgtgcacaccttcccagctgtcctacagtcctcaggactctactccctcagcagcgtggtgaccgtgccctccagcaacttcggcacccagacctacacctgcaacgtagatcacaagcccagcaacaccaaggtggacaagacagtg

SEQ ID NO: 2211 - DNA, 671 bp, synthetic construct
  misc_feature 1..671: note = Synthetic polynucleotide encoding artificial human antibody VH chain
  source 1..671: mol_type = other DNA
cccaggtgcagctgcaggagtcgggcccaggactggtgaagccttcacagaccctgtccctcacctgcactgtctctggtggctccatcagcagtggtggttactactggagctggatccgccagcacccagggaagggcctggagtggattgggtacatctattacagtgggagcacctactacaacccgtccctcaagagtcgagttaccatatcagtagacacgtctaagaaccagttctccctgaagctgagctctgtgactgccgcggacacggccgtgtattactgtgcgagagatctcagttgtagtagtaccagctgccatgatgcttttgatatctggggccaagggacaatggtcaccgtctcttcagcctccaccaagggcccatcggtcttccccctggcaccctcctccaagagcacctctgggggcacagcggccctgggctgcctggtcaaggactacttccccgaaccggtgacggtgtcgtggaactcaggcgccctgaccagcggcgtgcacaccttcccggctgtcctacagtcctcaggactctactccctcagcagcgtggtgaccgtgccctccagcagcttgggcacccagacctacatctgcaacgtgaatcacaagcccagcaacaccaaggtggacaagagtgag

SEQ ID NO: 2212 - DNA, 370 bp, synthetic construct
  misc_feature 1..370: note = Synthetic polynucleotide encoding artificial human antibody VH chain
  source 1..370: mol_type = other DNA
caggtgcagctggtgcagtctggggctgaggtgaagaagcctggggcctcagtgaaggtctcctgcaaggcttctggatacaccttcaccggctactatttacactgggtgcgacaggcccctggacaagggcttgagtggatgggacggatcaaccctaacagtggtggcacaaactatgcacagaactttcagggcagggtcaccatgaccagggacacgtccatcagcacagcctacatggagctgagcagtctaaaatctgacgacacggccgtgtttttttgtgcgagaggacccaatttccatgagagtatacgtgatggctttgatatctggggccaagggacaatggtcaccgtctcttcag

SEQ ID NO: 2213 - DNA, 355 bp, synthetic construct
  misc_feature 1..355: note = Synthetic polynucleotide encoding artificial human antibody VH chain
  source 1..355: mol_type = other DNA
gaggtgcagctggtggagtctgggggaggcttggtacagcctggggggtccctgagactctcctgtgcagcctctggattcaccttcagtagctacgactttcactgggtccgccaacctacagggaaaggtctggagtgggtctcagctattggtactgctggtgacacactctatctagactccgtgaagggccgattcaccatctccagagaaaatgccaagaactccttgtatcttcaaatgaacagcctgagagccggggacacggctgtctattactgtgcaagagttaactggaattccgatacctttgactcctggggccagggaaccctggtcaccgtctcctcag

SEQ ID NO: 2214 - DNA, 687 bp, synthetic construct
  misc_feature 1..687: note = Synthetic polynucleotide encoding artificial human antibody VH chain
  source 1..687: mol_type = other DNA
caggtgcagctggtggagtctgggggaggcgtggtccagcctgggaggtccctgagactctcctgtgcagcctctggattcaccttcaggagttatggcatgcactgggcccgccaggctccaggcagggggctggagtgggtggcagttatatcatatgatggaagtaatagttactatgcagactccgtgaagggccgattcaccatctccagagacaattccaagaacacgctgtatctagaaatgaacagcctgagagctgacgacacggctgtctattactgtgcgagagatccggggagagatccgtatttggacttggactatcactacggcatggacgtctggggccaagggaccacggtcaccgtctcctcagcatccccgaccagccccaaggtcttcccgctgagcctctgcagcacccagccagatgggaacgtggtcatcgcctgcctggtccagggcttcttcccccaggagccactcagtgtgacctggagcgaaagcggacagggcgtgaccgccagaaacttcccacccagccaggatgcctccggggacctgtacaccacgagcagccagctgaccctgccggccacacagtgcctagccggcaagtccgtgacatgccacgtgaagcactacacgaatcccagccaggatgtgactgtgccctgcccg

SEQ ID NO: 2215 - DNA, 663 bp, synthetic construct
  misc_feature 1..663: note = Synthetic polynucleotide encoding artificial human antibody VH chain
  source 1..663: mol_type = other DNA
caggtgcagttggtggaatctgggggaggcttggtcgagcctggagggtccctgagactctcctgtgcagcctctggattcaccttcagtgactactacatgagctggatccgccaggctccagggaagcggctggagtggatttcacacatgagtagtggcggtaatcgcagacactacgcagactctgtgaggggccgattcaccatttccagagacaacgccaagaactcactgtatctgcaaatgaacagcatgagagccgacgacacggctgtgtattattgtgcgagagataagaggagcggtatgacttccgacagacgaattgactactggggccagggcacccgggtcaccgtctcctcagcctccaccaagggcccatcggtcttccccctggcaccctcctccaagagcacctctgggggcacagcggccctgggctgcctggtcaaggactacttccccgaaccggtgacggtgtcgtggaactcaggcgccctgaccagcggcgtgcacaccttcccggctgtcctacagtcctcaggactctactccctcagcagcgtggtgaccgtgccctccagcagcttgggcacccagacctacatctgcaacgtgaatcacaagcccagcaacaccaaggtggacaagagagtt

SEQ ID NO: 2216 - DNA, 651 bp, synthetic construct
  misc_feature 1..651: note = Synthetic polynucleotide encoding artificial human antibody VH chain
  source 1..651: mol_type = other DNA
gtggtgcaactgggggagtctgggggaggcctggtcaagccgggggggtccctgagactctcctgtgcagcctctggattcaccttcagtagttatcacatgaactgggtccgccagtctccagagaaggggctggagtgggtctcatacattagtagtagtggtacttacatagactatgcagactcagtgaggggccgattcaccatctccagagacaacgccaagaactcactgtatctgcaaatgaacatcctgagacccgacgacacggctgtttattactgttcggggggctattactcctcctcccacatggacgtctggggcaaagggaccacggtcaccgtctcctcagcctccaccaagggcccatcggtcttccccctggcaccctcctccaagagcacctctgggggcacagcggccctgggctgcctggtcaaggactacttccccgaaccggtgacggtgtcgtggaactcaggcgccctgaccagcggcgtgcacaccttcccggctgtcctacagtcctcaggactctactccctcagcagcgtggtgaccgtgccctccagcagcttgggcacccagacctacatctgcaacgtgaatcacaagcccagcaacaccaaggtggacaagagagtt

SEQ ID NO: 2217 - DNA, 654 bp, synthetic construct
  misc_feature 1..654: note = Synthetic polynucleotide encoding artificial human antibody VH chain
  source 1..654: mol_type = other DNA
caggtgcagctggtggagtctgggggaggcgtggtccagcctgggaggtccctgagactctcctgtgcagcctctggattcaccttcagtagctatgctatgcactgggtccgccaggctccaggcaaggggctggagtgggtggcagtgatatcatatgatggaagcaataaatactacgcagactccttgaagggccgattcaccatctccagagacaattccaaggacacgctgtatctgcaagtgaacagcctgagacctgaggacacggctgtgtattactgtgcgagagtgaatatagcagcagctggtactcttgactactggggccagggaaccctggtcaccgtctcctcagcctccaccaagggcccatcggtcttccccctggcaccctcctccaagagcacctctgggggcacagcggccctgggctgcctggtcaaggactacttccccgaaccggtgacggtgtcgtggaactcaggcgccctgaccagcggcgtgcacaccttcccggctgtcctacagtcctcaggactctactccctcagcagcgtggtgaccgtgccctccagcagcttgggcacccagacctacatctgcaacgtgaatcacaagcccagcaacaccaaggtggacaagaatgag

SEQ ID NO: 2218 - DNA, 678 bp, synthetic construct
  misc_feature 1..678: note = Synthetic polynucleotide encoding artificial human antibody VH chain
  source 1..678: mol_type = other DNA
gaagtgcagctggtggaatctgggggaggcttggtagagcctggcaggtccctgagactctcctgtgcagcctctggattcacccttgaagagtttgccatgcactgggtccggcaagttccagggaagggcctggagtgggtctcagctatcagttggaatagtggttcgatagcctatgcggactctgtgaagggccgatttaccatctccagagacaacgccaagaactccctctatctgcaaatggacagtctgagagctgaggacacggccttgtattactgtgtaaaagatatggggcctgctggaactgcttcggcttatcactaccacaatggaatggacgtctggggccaagggaccacggtcaccgtctcctcagcctccaccaagggcccatcggtcttccccctggcaccctcctccaagagcacctctgggggcacagcggccctgggctgcctggtcaaggactacttccccgaaccggtgacggtgtcgtggaactcaggcgccctgaccagcggcgtgcacaccttcccggctgtcctacagtcctcaggactctactccctcagcagcgtggtgaccgtgccctccagcagcttgggcacccagacctacatctgcaacgtgaatcacaagcccagcaacaccaaggtggacaagagagag

SEQ ID NO: 2219 - DNA, 650 bp, synthetic construct
  misc_feature 1..650: note = Synthetic polynucleotide encoding artificial human antibody VH chain
  source 1..650: mol_type = other DNA
cccaggtgcagctgcaggagtcgggcccaggactggtgaagccttcggagaccctgtccctcacctgcactgtctctggtggctccatcagtgattactactggagctggatccggcagcccccagggaaggaactagagtggattgggtatatctattatagtgggagcaccaactacaacccctccctcaagagtcgagtcaccatctcagtagacacgtccaagaaccagttctccctgaaactgagctctgtgaccgccgcagacacggccgtatactactgtgcgagactaactactagtaccagcgcgctgagctactggggccagggaaccctggtcaccgtctcctcagcctccaccaagggcccatcggtcttccccctggcaccctcctccaagagcacctctgggggcacagcggccctgggctgcctggtcaaggactacttccccgaaccggtgacggtgtcgtggaactcaggcgccctgaccagcggcgtgcacaccttcccggctgtcctacagtcctcaggactctactccctcagcagcgtggtgaccgtgccctccagcagcttgggcacccagacctacatctgcaacgtgaatcacaagcccagcaacaccaaggtggacaagagtgag

SEQ ID NO: 2220 - DNA, 663 bp, synthetic construct
  misc_feature 1..663: note = Synthetic polynucleotide encoding artificial human antibody VH chain
  source 1..663: mol_type = other DNA
cccgtgcagctggtgcagtctggggctgaggtgaagaagcctgggtcctcggtgaaggtctcctgcaaggcttctggaggcaccttcagcagctatgctatcagctgggtgcgacaggcccctggacaagggcttgagtggatgggagggatcatccctatctttggtacagcaaactacgcacagaagttccagggcagagtcacgattaccgcggacgaatccacgagcacagcctacatggagctgagcagcctgagatctgaggacacggccgtgtattactgtgcgagagagaactggaactccgctggaactacggagtggttcgacccctggggccagggaaccctggtcaccgtctcctcagcctccaccaagggcccatcggtcttccccctggcaccctcctccaagagcacctctgggggcacagcggccctgggctgcctggtcaaggactacttccccgaaccggtgacggtgtcgtggaactcaggcgccctgaccagcggcgtgcacaccttcccggctgtcctacagtcctcaggactctactccctcagcagcgtggtgaccgtgccctccagcagcttgggcacccagacctacatctgcaacgtgaatcacaagcccagcaacaccaaggtggacaagagagtt

SEQ ID NO: 2221 - DNA, 354 bp, synthetic construct
  misc_feature 1..354: note = Synthetic polynucleotide encoding artificial human antibody VH chain
  source 1..354: mol_type = other DNA
cccaggttcagctggtgcagtctggagctgaggtgaagaagcctggggcctcagtgaaggtctcctgcaaggcttctggttacacctttagcagctacggtatcagctgggtgcgacaggcccctggacaggggcttgagtggatgggatggatcaacggttacaatggtaacacaaactatgcacagaagctccagggcagagtcaccatgaccacagacacatccacgagcacagcctacatggacctgaggagcctgagatctgacgacacggccgtgtattactgtgcgagagatactctacaaaagggggactactggggccagggaaccctggtcaccgtctcctccg

SEQ ID NO: 2222 - DNA, 672 bp, synthetic construct
  misc_feature 1..672: note = Synthetic polynucleotide encoding artificial human antibody VH chain
  source 1..672: mol_type = other DNA
gtggtgcagctggtggagtctgggggaggcttggtacagcctggagggtccctgagactctcctgtgcagcctctggattcaccttccggagttatgaaatgaactgggtccgccaggctccagggaaggggctggagtgggtttcatacattactagtagtggtgataccatataccacgcagactctgtgaagggccgattcaccatctccagagacaacactaagaactcactatatctgcaaatgaccggcctgagaaccgaggacacggctgtttattactgtgcgagagcctcccgcgttctagaaagtaagagctggcacggggatgcttttgatgtctggggccgagggacaagggtcatcgtctcttcagcctccaccaagggcccatcggtcttccccctggcaccctcctccaagagcacctctgggggcacagcggccctgggctgcctggtcaaggactacttccccgaaccggtgacggtgtcgtggaactcaggcgccctgaccagcggcgtgcacaccttcccggctgtcctacagtcctcaggactctactccctcagcagcgtggtgaccgtgccctccagcagcttgggcacccagacctacatctgcaacgtgaatcacaagcccagcaacaccaaggtggacaagaaagtg

SEQ ID NO: 2223 - DNA, 654 bp, synthetic construct
  misc_feature 1..654: note = Synthetic polynucleotide encoding artificial human antibody VH chain
  source 1..654: mol_type = other DNA
caggtgcagctggtgcagtctggggctgaggtgaagaagcctgggtcctcggtgaaggtctcctgcaaggcttctggaggcaccttcagcagctatgctatcagctgggtgcgacaggcccctggacaagggcttgagtggatgggagggatcatccctatctttggtacaacaaactacgcacagaagttccagggcagagtcacgattaccgcggacgaatccacgagcacagcctacatggagctgagcagcctgagatctgaggacacggccgtgtattactgtgcgaggggtcttggcggtagtggttattattttgactactggggccagggaaccctggtcaccgtctcctcagcctccaccaagggcccatcggtcttccccctggcaccctcctccaagagcacctctgggggcacagcggccctgggctgcctggtcaaggactacttccccgaaccggtgacggtgtcgtggaactcaggcgccctgaccagcggcgtgcacaccttcccggctgtcctacagtcctcaggactctactccctcagcagcgtggtgaccgtgccctccagcagcttgggcacccagacctacatctgcaacgtgaatcacaagcccagcaacaccaaggtggacaagaatgag

SEQ ID NO: 2224 - DNA, 373 bp, synthetic construct
  misc_feature 1..373: note = Synthetic polynucleotide encoding artificial human antibody VH chain
  source 1..373: mol_type = other DNA
gaggtgcagctggtgcagtctggagcagaggtgaaaaagcccggggagtctctgaagatctcctgtaggggttctggagacagcttcaacaagtactttatcggctgggtgcgccaggtgcccgggaaagccctggagtggatggggatcatctatcctggtgactctgataccagatacagtccgtctttccaaggccaggtcaccatctcagccgacaagtccatcaacatcgcctacctgcagtggaccagcctgaaggcctcggacaccgccatgtattactgtgcgagacaggcattttgtggtgctaattgctggtcgggcgcttatgatatctggggccaagggacaatggtcaccgtctcttcag

SEQ ID NO: 2225 - DNA, 672 bp, synthetic construct
  misc_feature 1..672: note = Synthetic polynucleotide encoding artificial human antibody VH chain
  source 1..672: mol_type = other DNA
caggtacagcttgtggagtctgggggaggcgtggtccagcctgggaggtccctgagactctcctgtgcagcgtctggtttcacattcagtacctatggcatgaactgggtccgccaggctccaggcaaggggctggagtgggtggcagttacatggtatgaggggactaacgaagagtatgcagactccgtgaagggccgattcaccatctccagagacaactccaagaacacggtgtatttgcaaatgaatagtttgagagtcgacgatacggctgtgtattattgtgtgagaaggggggcgactgtatttcagggaaagataattaaaggctacatggacgtctggggcaaagggaccacggtcaccgtctcctcagcctccaccaagggcccatcggtcttccccctggcaccctcctccaagagcacctctgggggcacagcggccctgggctgcctggtcaaggactacttccccgaaccggtgacggtgtcgtggaactcaggcgccctgaccagcggcgtgcacaccttcccggctgtcctacagtcctcaggactctactccctcagcagcgtggtgaccgtgccctccagcagcttgggcacccagacctacatctgcaacgtgaatcacaagcccagcaacaccaaggtggacaagagagag

SEQ ID NO: 2226 - DNA, 645 bp, synthetic construct
  misc_feature 1..645: note = Synthetic polynucleotide encoding artificial human antibody VH chain
  source 1..645: mol_type = other DNA
gtggtgcagttgttggagtctgggggaggcttggtacagcctggggggtccctgagactctcctgtacagcctctggattcgcctttagcagctatgccatgacctgggtccgccaggctccagggaaggggctggagtgggtctcagttatgagtggtagtggtgctggcacatactacgcagacgccgtgaagggccggttcaccatctccagagacaattccaagaacacgctgtatctgcaaatggaaagcctgagagtcgaagacacggccgtatattactgtgcgaaagtgaagggggggtccaatgactactggggccagggaaccctggtcaccgtctcctcagcctccaccaagggcccatcggtcttccccctggcaccctcctccaagagcacctctgggggcacagcggccctgggctgcctggtcaaggactacttccccgaaccggtgacggtgtcgtggaactcaggcgccctgaccagcggcgtgcacaccttcccggctgtcctacagtcctcaggactctactccctcagcagcgtggtgaccgtgccctccagcagcttgggcacccagacctacatctgcaacgtgaatcacaagcccagcaacaccaaggtggacaagaatgag

SEQ ID NO: 2227 - DNA, 654 bp, synthetic construct
  misc_feature 1..654: note = Synthetic polynucleotide encoding artificial human antibody VH chain
  source 1..654: mol_type = other DNA
caggtgcagctggtggagtctgggggaggcgtggtccagcctgggaggtccctgagactctcctgtgcagcctctggattcaccttcagtaatcatgctatgcactgggtccgccaggctccaggcaaagggctggagtgggtggcagttatatcatatgatggaggcactaaatactacgcagactccgtgaagggccgattcaccatctccagagacaagtccaagaacacactgtatctgcaaatgaacagcctgagacctgaggacacggctctatattactgtgcgagacacctctacggtgacttttactacttagactactggggccagggaaccctggtcaccgtctcctcagcctccaccaagggcccatcggtcttccccctggcaccctcctccaagagcacctctgggggcacagcggccctgggctgcctggtcaaggactacttccccgaaccggtgacggtgtcgtggaactcaggcgccctgaccagcggcgtgcacaccttcccggctgtcctacagtcctcaggactctactccctcagcagcgtggtgaccgtgccctccagcagcttgggcacccagacctacatctgcaacgtgaatcacaagcccagcaacaccaaggtggacaagagaggt

SEQ ID NO: 2228 - DNA, 654 bp, synthetic construct
  misc_feature 1..654: note = Synthetic polynucleotide encoding artificial human antibody VH chain
  source 1..654: mol_type = other DNA
caggtgcagctggtggagtctgggggaggcgtggtccggcctgggaggtccctgagactctcctgtgcagcgtctggattcaccttcagtagtcatggcatgcactgggtccgccaggctccaggcaaggggctggagtgggtggcagttatatggtatgatggaagtactaaatactatacagactccgtgaagggccgattcaccatctccagagacaattccaagaacacgttgttcctgcaattgaacagcctgagagccgaggacacggctgtgtattactgtgcgagagaccatcgtacggggagttattatcccgactactggggccagggaaccctggtcaccgtctcctcaacctccaccaagggcccatcggtcttccccctggcaccctcctccaagagcacctctgggggcacagcggccctgggctgcctggtcaaggactacttccccgaaccggtgacggtgtcgtggaactcaggcgccctgaccagcggcgtgcacaccttcccggctgtcctacagtcctcaggactctactccctcagcagcgtggtgaccgtgccctccagcagcttgggcacccagacctacatctgcaacgtgaatcacaagcccagcaacaccaaggtggacaagagagtt

SEQ ID NO: 2229 - DNA, 663 bp, synthetic construct
  misc_feature 1..663: note = Synthetic polynucleotide encoding artificial human antibody VH chain
  source 1..663: mol_type = other DNA
caggtgcagctgcaggagtcgggcccaggactggtgaagccttcggagaccctgtccctcacctgcactgtctctggtggctccgtcgacaatgttgattcctactggagctggatccggcagcccccagggaagggactggagtggattgcatatatctatttcactgggagcaccaactacaacccctccctcaagagtcgagtcaccatatcaatagacacgtccaagaaccagttctccctgaaggtgaacgctgtgaccgctgcggacacggccgtgtattattgtgcgagaggggtgaggcagcagcaggttcggaagtggttcgacccctggggccggggaaccctggtcaccgtctcctcagcctccaccaagggcccatcggtcttccccctggcaccctcctccaagagcacctctgggggcacagcggccctgggctgcctggtcaaggactacttccccgaaccggtgacggtgtcgtggaactcaggcgccctgaccagcggcgtgcacaccttcccggctgtcctacagtcctcaggactctactccctcagcagcgtggtgaccgtgccctccagcagcttgggcacccagacctacatctgcaacgtgaatcacaagcccagcaacaccaaggtggacaagaatgag

SEQ ID NO: 2230 - DNA, 669 bp, synthetic construct
  misc_feature 1..669: note = Synthetic polynucleotide encoding artificial human antibody VH chain
  source 1..669: mol_type = other DNA
ccggtgcagctggtgcagtctggagcagaggtgaaaaagccgggggagtctctgaagatctcctgtaagggttctggatacagctttaccacctactggatcggctgggtgcgccagatgcccgggaaaggcctggagtggatggggatcatctatcctggtgactctgataccagatacagcccgtccttccaaggccaggtcaccatctcagccgacaagtccatcagcaccgcctacctgcagtggaacagcctgaaggcctcggacaccgccatgtattactgtgcgatggataattcggggagcgggggcgttgactactggggccagggaaccctggtcaccgtctcctcagggagtgcatccgccccaacccttttccccctcgtctcctgtgagaattccccgtcggatacgagcagcgtggccgttggctgcctcgcacaggacttccttcccgactccatcactttctcctggaaatacaagaacaactctgacatcagcagcacccggggcttcccatcagtcctgagagggggcaagtacgcagccacctcacaggtgctgctgccttccaaggacgtcatgcagggcacagacgaacacgtggtgtgcaaagtccagcaccccaacggcaacaaagaaaagaacgtgcctcttcca

SEQ ID NO: 2231 - DNA, 654 bp, synthetic construct
  misc_feature 1..654: note = Synthetic polynucleotide encoding artificial human antibody VH chain
  source 1..654: mol_type = other DNA
caggtgcagctgcaggagtcgggcccaggactggtgaagccttcacagaccctgcccctcacctgcactgtctctggtgactccatcagcagtgggagttactattggagctggatccggcagcccgccgggaagggactggagtggattgggcgtatctataccagtgggagcaccaagtacaacccctccctcaagagtcgagccaccatatcaatagacacgtccaagaaccagttctccctgaaactgagctctgtgaccgccgcagacacggccgtgtattactgtgcgagagatagttatcactactacggtatggacgtctggggccaagggaccacggtcaccgtctcctcagcctccaccaagggcccatcggtcttccccctggcaccctcctccaagagcacctctgggggcacagcggccctgggctgcctggtcaaggactacttccccgaaccggtgacggtgtcgtggaactcaggcgccctgaccagcggcgtgcacaccttcccggctgtcctacagtcctcaggactctactccctcagcagcgtggtgaccgtgccctccagcagcttgggcacccagacctacatctgcaacgtgaatcacaagcccagcaacaccaaggtggacaagagtgag

SEQ ID NO: 2232 - DNA, 672 bp, synthetic construct
  misc_feature 1..672: note = Synthetic polynucleotide encoding artificial human antibody VH chain
  source 1..672: mol_type = other DNA
caggtacaactgcagcagtcaggtccaggactggtgaagccctcgcagaccctctcactcacctgtgccatctccggggacagtgtctctagcaacagtgctgcttggcactggatcaggcagtccccatcgagaggccttgagtggctgggaaggacacactacaggtccaagtggtataatgagtatgcagtatctgtgaagagtcgaataaccatcaacccagacatatccaaaaaccagttctccctgcagttgagctctgtgactcccgaggacacggctgtgtattactgtgcaagagagaccgtttacatctctacttactactacggtttggacgtctggggccaagggaccacggtcaccgtctcctcagcctccaccaagggcccatcggtcttccccctggcaccctcctccaagagcacctctgggggcacagcggccctgggctgcctggtcaaggactacttccccgaaccggtgacggtgtcgtggaactcaggcgccctgaccagcggcgtgcacaccttcccggctgtcctacagtcctcaggactctactccctcagcagcgtggtgaccgtgccctccagcagcttgggcacccagacctacatctgcaacgtgaatcacaagcccagcaacaccaaggtggacaagaaggtg

SEQ ID NO: 2233 - DNA, 654 bp, synthetic construct
  misc_feature 1..654: note = Synthetic polynucleotide encoding artificial human antibody VH chain
  source 1..654: mol_type = other DNA
cccgtccagctgatacagtctggggctgaggtgaggaagcctggggcctcagtgaaggtctcttgcaaggtctccggatacaccctcagtgaattatccctgcactgggtgcgacaggctcctggaaaagggcttgagtggatgggaacttttgatcctgaagatggtgaaacagtctacgcacagaagttccagggcagagtcaccgtgaccgaggacacatctacagacacagcctacattgacctgagcagcctgaaatctgaggacacggccgtctattactgtgcaacagatgggcccttacatacgtcgggacttgactactggggccagggaaccctggtcaccgtctcctcagcctccaccaagggcccatcggtcttccccctggcgccctgctccaggagcacctccgagagcacagcggccctgggctgcctggtcaaggactacttccccgaaccggtgacggtgtcgtggaactcaggcgccctgaccagcggcgtgcacaccttcccggctgtcctacagtcctcaggactctactccctcagcagcgtggtgaccgtgccctccagcagcttgggcacccagacctacatctgcaacgtgaatcacaagcccagcaacaccaaggtggacaagagagtg

SEQ ID NO: 2234 - DNA, 654 bp, synthetic construct
  misc_feature 1..654: note = Synthetic polynucleotide encoding artificial human antibody VH chain
  source 1..654: mol_type = other DNA
gtggtgcagctggtggagtctgggggaggcctggtcaagcctggggggtccctgagactctcctgtgcagcctctggattcaccttcagtagctatagcatgaactgggtccgccaggctccagggaaggggctggagtgggtctcatccattagtagtagtagtagttacatatactacgcagactcagtgaagggccgattcaccatctccagagacaacgccaagaactcactgtatctgcaaatgaacagcctgagagccgaggacacggctgtgtattactgtgcgtgcttgggggctgaggcgaacgatgcttttgatatctggggccaagggacaatggtcaccgtctcttcagcctccaccaagggcccatcggtcttccccctggcaccctcctccaagagcacctctgggggcacagcggccctgggctgcctggtcaaggactacttccccgaaccggtgacggtgtcgtggaactcaggcgccctgaccagcggcgtgcacaccttcccggctgtcctacagtcctcaggactctactccctcagcagcgtggtgaccgtgccctccagcagcttgggcacccagacctacatctgcaacgtgaatcacaagcccagcaacaccaaggtggacaagagagtg

SEQ ID NO: 2235 - DNA, 638 bp, synthetic construct
  misc_feature 1..638: note = Synthetic polynucleotide encoding artificial human antibody VH chain
  source 1..638: mol_type = other DNA
gagaggtgcagctcttggagtctgggggaggcttggtacagcctggggggtccctgagactctcctgtgcagcctctggattcacctttagcaactatgccatgaactgggtccgccaggctccagggaaggggctggactgggtctcagctattagtggtagtggtggtagtacatactacgcagactccgtgaagggccgcttcaccatctccagagacatttccaagaacacgctgtatctgcaaatgaacagcctgagagccgaggacacggccgtctattactgtgcgaaagtccctggggactactggggccagggaaccctggtcaccgtctcctcagcctccaccaagggcccatcggtcttccccctggcaccctcctccaagagcacctctgggggcacagcagccctgggctgcctggtcaaggactacttccccgaaccggtgacggtgtcgtggaactcaggcgccctgaccagcggcgtgcacaccttcccggctgtcctacagtcctcaggactctactccctcagcagcgtggtgaccgtgccctccagcagcttgggcacccagacctacatctgcaacgtgaatcacaagcccagcaacaccaaggtggacaagaatgag

SEQ ID NO: 2236 - DNA, 660 bp, synthetic construct
  misc_feature 1..660: note = Synthetic polynucleotide encoding artificial human antibody VH chain
  source 1..660: mol_type = other DNA
caggtcaagctggtgcaatctggggctgaggtgaagaagcctgggtcctcggtaaaggtctcctgcaagacttctggaggccccttcagcagctatactatcacctgggtgcgacaggcccctggacaagggcctgagtggatgggaaggatcacccctatttttaatataacgaactacgcacagaacttccagggcagaatgacgatgaccgcggacaaatccacgaccacggcctacatggaattgagcggcctgaaatctgaggacacggccgtctattactgtgcgagagcgggccttagtaccagttggccgagctggttcgacccctggggccagggaaccctggtcaccgtctcctcagcctccaccaagggcccatcggtcttccccctggcaccctcctccaagagcacctctgggggcacagcggccctgggctgcctggtcaaggactacttccccgaaccggtgacggtgtcgtggaactcaggcgccctgaccagcggcgtgcacaccttcccggctgtcctacagtcctcaggactctactccctcagcagcgtggtgaccgtgccctccagcagcttgggcacccagacctacatctgcaacgtgaatcacaagcccagcaacaccaaggtggacaagaaagtg

SEQ ID NO: 2237 - DNA, 660 bp, synthetic construct
  misc_feature 1..660: note = Synthetic polynucleotide encoding artificial human antibody VH chain
  source 1..660: mol_type = other DNA
caggtgcagctgcaggagtcgggcccaggactggtgaagccgtcacagaccctgtcgctcacctgcacggtgtctggtggctccgtcaacactggtacttcctactggacctgggtccgccagcgcccagggaagggcctggagtggattgggttcatctattatagtgggagcacctactacaatccagccctcgagagtcgacttaccatatcactagacacctctcagaatcagttctccctgaaattgacctctgtgactgccgcggacacggccgtgtatttctgtgcgagaaacgatatttccttcaaacagagtgctatcgacgtctggggccaagggaccacggtcaccgtctcctcagcctccaccaagggcccatcggtcttccccctggcaccctcctccaagagcacctctgggggcacagcggccctgggctgcctggtcaaggactacttccccgaaccggtgacggtgtcgtggaactcaggcgccctgaccagcggcgtgcacaccttcccggctgtcctacagtcctcaggactctactccctcagcagcgtggtgaccgtgccctccagcagcttgggcacccagacctacatctgcaacgtgaatcacaagcccagcaacaccaaggtggacaagagagtg

SEQ ID NO: 2238 - DNA, 666 bp, synthetic construct
  misc_feature 1..666: note = Synthetic polynucleotide encoding artificial human antibody VH chain
  source 1..666: mol_type = other DNA
caggtgcacctggcagagtcggggggaggcgtggtccagacgggggggtccctgagactctcctgtgcagtgtctggattccatttcggcagtcacggcatgacctgggtccgccaggccccaggcaagggcctggagtggctgtcatttataacttatgatggacaaatcaaatattatggagggtccgtgaagggccgattcaacatctccagagacaattccaagaacactctccacctgcacatgaacggcctgagagttgaggacacggctgtttactactgtgcgaaaacgaagactatgggtgtggggggagagtatttcggcttggacgtctggggcctagggacgacggtcatcgtctcctcagcctccaccaagggcccatcggtcttccccctggcaccctcctccaagagcacctctgggggcacagcggccctgggctgcctggtcaaggactacttccccgaatcggtgacggtgtcgtggaactcaggcgccctgaccagcggcgtgcacaccttcccggctgtcctacagtcctcaggactctactccctcagcagcgtggtgaccgtgccctccagcagcttgggcacccagacctacatctgcaacgtgaatcacaagcccagcaacaccaaggtggacaagaaagtg

SEQ ID NO: 2239 - DNA, 666 bp, synthetic construct
  misc_feature 1..666: note = Synthetic polynucleotide encoding artificial human antibody VH chain
  source 1..666: mol_type = other DNA
cccctgcagctgcatgagtcgggcccaggactggcgaagccttcggagaccctgtccctcacctgcactctctctggtggctccatcaccactggtagttattactgggcctggatccgccaggctccagggaaggctctggagtggattgggaccatttattatagtgggaccacctactataattcgtccctcaacaatcgactcaccatttccgtggacacgtccaagaaccagctctccttgaagctggtttctgtggccgccgcagacacggctatatattactgtgcgagacacaaggccctctggttcggggaggcaggggcttttgatatctggggtcaagggacaatggtcacggtctcttcagcctccaccaagggcccatcggtcttccccctggcaccctcctccaagagcacctctgggggcacagcggccctgggctgcctggtcaaggactacttccccgaaccggtgacggtgtcgtggaactcaggcgccctgaccagcggcgtgcacaccttcccggctgtcctacagtcctcaggactctactccctcagcagcgtggtgaccgtgccctccagcagcttgggcacccagacctacatctgcaacgtgaatcacaagcccagcaacaccaaggtggacaagaaggtg

SEQ ID NO: 2240 - DNA, 669 bp, synthetic construct
  misc_feature 1..669: note = Synthetic polynucleotide encoding artificial human antibody VH chain
  source 1..669: mol_type = other DNA
gaagtgcagctggtggagtctgggggaggcttggtacagcctggcaggtccctgagactctcctgtgcagcctctggattcacctttgatgattatgccatgcactgggtccggcaagctccagggaagggcctggagtgggtctcaggtattagttggaatagtggtagcataggctatgcggactctgtgaagggccgattcaccatctccagagacaacgccaagaactccctgtatctgcaaatgaacagtctgagagctgaggacacggccttgtattactgtgcaaaagatttgttagggttcagggaccaaaggaactactacggtatggacgtctggggccaagggaccacggtcaccgtctcctcagcctccaccaagggcccatcggtcttccccctggcaccctcctccaagagcacctctgggggcacagcggccctgggctgcctggtcaaggactacttccccgaaccggtgacggtgtcgtggaactcaggcgccctgaccagcggcgtgcacaccttcccggctgtcctacagtcctcaggactctactccctcagcagcgtggtgaccgtgccctccagcagcttgggcacccagacctacatctgcaacgtgaatcacaagcccagcaacaccaaggtggacaagagagtt

SEQ ID NO: 2241 - DNA, 358 bp, synthetic construct
  misc_feature 1..358: note = Synthetic polynucleotide encoding artificial human antibody VH chain
  source 1..358: mol_type = other DNA
caggtgcaactgcaggagtcgggcccaggactggtgaagccttcggagaccctgtccctcagttgcactgtctcaggtgcctccatgaataattactactggagttggatcaggcagtccgccgggaagggtctggaatggattgggcgtatatatagtagtggagacaccgactacaacccctccctgaagactcgagtcaccatgtcaatagacacgtccaagaaccagttctccctgaacctagactctgtgaccgccgcggacacggccacatattactgtgcgagaagcttctacgacacccttttctactttgagaactggggccagggaaccctcgtcaccgtctcctcag

SEQ ID NO: 2242 - DNA, 656 bp, synthetic construct
  misc_feature 1..656: note = Synthetic polynucleotide encoding artificial human antibody VH chain
  source 1..656: mol_type = other DNA
cccagatcaccttgaaggagtctggtcctacgctggtgaaacccacacagaccctcacgctgacctgcaccttctctgggttctcactcaccactactgacgtgggtgtgggctggatccgtcagcccccaggaaaggccctggaatggcttacaatcatttattgggatgatgatgagcgctacagtccatccctgaagagcaggctcaccatcaccaaggacacctccaaaaaccaggtggtcctctcaatgaccaacatggaccctgtggacacagccacatattactgtgcacgcgtttatagtaccaagtgggactttgactactggggccagggaaccctggtcaccgtctcctcagcctccaccaagggcccatcggtcttccccctggcaccctcctccaagagcacctctgggggcacagcggccctgggctgcctggtcaaggactacttccccgaaccggtgacggtgtcgtggaactcaggcgccctgaccagcggcgtgcacaccttcccggctgtcctacagtcctcaggactctactccctcagcagcgtggtgaccgtgccctccagcagcttgggcacccagacctacatctgcaacgtgaatcacaagcccagcaacaccaaggtggacaagagagtg

SEQ ID NO: 2243 - DNA, 648 bp, synthetic construct
  misc_feature 1..648: note = Synthetic polynucleotide encoding artificial human antibody VH chain
  source 1..648: mol_type = other DNA
gtggtgcagctggtggagtctgggggaggcttggttcagcctggggggtccctgagactctcctgtgcagcctctggattcaccttcagtagctattccatgaactgggtccgccaggctccagggaagggtctggagtggctttcatacgttagcagtagtggtagtaccatgtactatgcagactctgtgaagggccgattcaccatctccagagacactgccaagaactcactgtttctgcaaatgaacagcctgagagccgaggacacggctgtttattactgtgcgaaagggggccctttacgtccttttgatatctggggccaagggacactggtcaccgtctcttcagcctccaccaagggcccatcggtcttccccctggcaccctcctccaagagcacctctgggggcacagcggccctgggctgcctggtcaaggactacttccccgaaccggtgacggtgtcgtggaactcaggcgccctgaccagcggcgtgcacaccttcccggctgtcctacagtcctcaggactctactccctcagcagcgtggtgaccgtgccctccagcagcttgggcacccagacctacatctgcaacgtgaatcacaagcccagcaacaccaaggtggacaagaaagtg

SEQ ID NO: 2244 - DNA, 678 bp, synthetic construct
  misc_feature 1..678: note = Synthetic polynucleotide encoding artificial human antibody VH chain
  source 1..678: mol_type = other DNA
gccgtgcagctggtgcagtctggagcagaggtgaaaaagcccggggagtctctgaagatctcctgtaggggttctggatacaactttatcagccactggatcagctgggtgcgccagatgcccgggaaaggcctggagtggcagtggctggggaggattgatcctagtgactcttataccaattacagcccgtccttccgaggccacgtcaccatctcagttgacaagtccgtcaacactgcctacctgcaatggaacagcctgaaggcctcggacaccgccatgtattactgtgcgagacttagtagagacggctacaccattgagcactttgactactggggccagggaaccctggtcaccgtctcctcagcatccccgaccagccccaaggtcttcccgctgagcctcgacagcaccccccaagatgggaacgtggtcgtcgcatgcctggtccagggcttcttcccccaggagccactcagtgtgacctggagcgaaagcggacagaacgtgaccgccagaaacttcccacctagccaggatgcctccggggacctgtacaccacgagcagccagctgaccctgccggccacacagtgcccagacggcaagtccgtgacatgccacgtgaagcactacacgaatcccagccaggatgtgactgtgccctgcccg

SEQ ID NO: 2245 - DNA, 674 bp, synthetic construct
  misc_feature 1..674: note = Synthetic polynucleotide encoding artificial human antibody VH chain
  source 1..674: mol_type = other DNA
ccgaggtgcagctggtgcagtctggagcagaggtgaaaaagcccggggagtctctgaagatctcctgtaagggttctggatacagctttaccagcttctggatcggctgggtgcgccagatgcccgggaaaggcctggagtggatggggatcatctttcctgctgactctgataccagatacagcccgtcattccaaggccaggtcatcatctcagtcgacaagtccatcagcaccgcctacctgcagtggagcagcctgaaggcctcggacaccgccatgtattactgtgcgagacgcggggttagtggtgggagcgcctggacgtattacaactttttcgacccctggggccagggaaccctggtcaccgtcgcctcagcctccaccaagggcccatcggtcttccccctggcaccctcctccaagagcacctctgggggcacagcagccctgggctgcctggtcaaggactacttccccgaaccggtgacggtgtcgtggaactcaggcgccctgaccagcggcgtgcacaccttcccggctgtcctacagtcctcaggactctactccctcagcagcgtggtgaccgtgccctccagcagcttgggcacccagacctacatctgcaacgtgaatcacaagcccagcaacaccaaggtggacaagaaggtg

SEQ ID NO: 2246 - DNA, 666 bp, synthetic construct
  misc_feature 1..666: note = Synthetic polynucleotide encoding artificial human antibody VH chain
  source 1..666: mol_type = other DNA
cccgtgcagctgcaggagtcgggcccaggactggtgaagccttcggagaccctgtccctcacctgcactgtctctggtggctccatcgatagttattactggagctggctccggcagcccccagggaggggactagagtggattgggtatatcttttacagtggaattaccaactacagcccttccctcaagagtcgagtcaccatatcggtcgacacgtccaagaaccagttctccctgaaactgaactctgtgaccgctgcggacacggccgtgtattactgtgcgagagaacttcccgtgattggtagacgtacttttgatatctggggccaagggacaatggtcaccgtctcttcagcatccccgaccagccccaaggtcttcccgctgagcctctgcagcacccagccagatgggaacgtggtcatcgcctgcctggtccagggcttcttcccccaggagccactcagtgtgacctggagcgaaagcggacagggcgtgaccgccagaaacttcccacccagccaggatgcctccggggacctgtacaccacgagcagccagctgaccctgccggccacacagtgcctagccggcaagtccgtgacatgccacgtgaagcactacacgaatcccagccaggatgtgactgtgccctgcccg

SEQ ID NO: 2247 - DNA, 681 bp, synthetic construct
  misc_feature 1..681: note = Synthetic polynucleotide encoding artificial human antibody VH chain
  source 1..681: mol_type = other DNA
cccgtgcatctggtgcagtctggggctgaggtgaagaagcctgggtcctcggtgaaggtctcctgcaaactttctggaggcatcttcagttactttgctatcatctgggtgcgacaggcccctggacaaggccttgagtggatgggaacgatcatccctatttttggaacatcaaactacgcagagaaattccaggacagagtcgcgattgtcgcggacgaggccacgagtacagtttacatggaggtgaacagcctgagatctgaggacacggccatatatttctgtgcgagagattccgaggtggaaaagagtgatgggtacatggcctcgaccgctgaatacttccaactctggggccagggcaccctggtcaccgtctcttcagcctccaccaagggcccatcggtcttccccctggcaccctcctccaagagcacctctgggggcacagcggccctgggctgcctggtcaaggactacttccccgaaccggtgacggtgtcgtggaactcaggcgccctgaccagcggcgtgcacaccttcccggctgtcctacagtcctcaggactctactccctcagcagcgtggtgaccgtgccctccagcagcttgggcacccagacctacatctgcaacgtgaatcacaagcccagcaacaccaaggtggacaagaaggtg

SEQ ID NO: 2248 - DNA, 665 bp, synthetic construct
  misc_feature 1..665: note = Synthetic polynucleotide encoding artificial human antibody VH chain
  source 1..665: mol_type = other DNA
gaagtgcgatgcacctggtggagtctgggggagccgtggtccagccgggggagtccctgaggctctcctgttcagcctttgaattcagctttcaatatttttccatgttctgggtccgtcaagctccgacgaagggtcttgagttggtcgctcaaatcacttgggatggttctataataaactacgcagactctgtgaagggccgattcaccatctccagagacaacagcaaaaactccctgtatcttcaaatgaccagtctaagaagtgacgacaccgccgtgtattactgtgtaaaagcaggtgtcccgtgggaggtccagcgatggttcgacccctggggccagggaaccccggtcaccgtctcctcagcctccaccaagggcccatcggtcttccccctggcgccctgctccaggagcacctccgagagcacagcggccctgggctgcctggtcaaggactacttccccgaaccggtgacggtgtcgtggaactcaggcgctctgaccagcggcgtgcacaccttcccagctgtcctacagtcctcaggactctactccctcagcagcgtggtgaccgtgccctccagcaacttcggcacccagacctacacctgcaacgtagatcacaagcccagcaacaccaaggtggacaagacagtg

SEQ ID NO: 2249 - DNA, 666 bp, synthetic construct
  misc_feature 1..666: note = Synthetic polynucleotide encoding artificial human antibody VH chain
  source 1..666: mol_type = other DNA
caggttcacctggtgcagtctggagctgaagtgaagaggcctggggcctcagtgaaggtctcctgcaagggttctggttacacccttaacaatgatgtcgctttcagttgggtgcgacaggcccctggacaagggcctgagtggctgggatggatcaatgcttaccagggcgtcacaaatatttccccgaatttccgggccagagtcaccatgaccacagacacatccacgaacacaatttacatggacctccagaacctgaggtccgacgacacggccatctattactgtgcgagagatcgtcagggcctaggccgtatggacgtctggggccaggggaccacggtcatcgtctcctcagcatccccgaccagccccaaggtcttcccgctgagcctctgcagcacccagccagatgggaacgtggtcatcgcctgcctggtccagggcttcttcccccaggagccactcagtgtgacctggagcgaaagcggacagggcgtgaccgccagaaacttcccacccagccaggatgcctccggggacctgtacaccacgagcagccagctgaccctgccggccacacagtgcctagccggcaagtccgtgacatgccacgtgaagcactacacgaatcccagccaggatgtgactgtgccctgcccg

SEQ ID NO: 2250 - DNA, 651 bp, synthetic construct
  misc_feature 1..651: note = Synthetic polynucleotide encoding artificial human antibody VH chain
  source 1..651: mol_type = other DNA
gtggtgcagctggtggagtctgggggaggcttggtccagcctggggggtccctcagactctcctgtgcagcctctggattcaggtttaattactattggatgagctgggtccgccaggctccagggaaaggcctggagtgggtggccaacataaaggaagatggaagtgagaaatactatgtggactctgtgaagggccgattcaccatctccagagacaacgccaagaactcactgtatctggaaatgaacagcctgagagtcgaggacacggctgtctattactgtgcgagggaactgggtgcgaactactactttgcctattggggccagggagccctggtcaccgtctcctcagcctccaccaagggcccatcggtcttccccctggcaccctcctccaagagcacctctgggggcacagcggccctgggctgcctggtcaaggactacttccccgaaccggtgacggtgtcgtggaactcaggcgccctgaccagcggcgtgcacaccttcccggctgtcctacagtcctcaggactctactccctcagcagcgtggtgaccgtgccctccagcagcttgggcacccagacctacatctgcaacgtgaatcacaagcccagcaacaccaaggtggacaagagagtg

SEQ ID NO: 2251 - DNA, 665 bp, synthetic construct
  misc_feature 1..665: note = Synthetic polynucleotide encoding artificial human antibody VH chain
  source 1..665: mol_type = other DNA
cccaggtgcagctgcaggagtcgggcccaggactggtgaagccttcacagaccctgtccctcacctgcattgtctctggtggctccatcagtggtgataaaaacttctggagttgggtccgccagcacccagagaagggcctggagtggcttgggtacatctcttacaatgggaacacctactacaatccgtcgctcatcagtcgaattatcatatcactagacaccccaaagaacctgttctccctgaggttgagctctgtgactgtcgcggacacggccatttattactgtgcgagggaagtcgatatacgtggagacagcgatgcttttgatatttggggccgagggacagtggtcaccgtttcttcagcctccaccaagggcccatcggtcttccccctggcgccctgctccaggagcacctccgagagcacagcggccctgggctgcctggtcaaggactacttccccgaaccggtgacggtgtcgtggaactcaggcgctctgaccagcggcgtgcacaccttcccggctgtcctacagtcctcaggactctactccctcagcagcgtggtgaccgtgacctccagcaacttcggcacccagacctacacctgcaacgtagatcacaagcccagcaacaccaaggtggacaagacagtg

SEQ ID NO: 2252 - DNA, 654 bp, synthetic construct
  misc_feature 1..654: note = Synthetic polynucleotide encoding artificial human antibody VH chain
  source 1..654: mol_type = other DNA
caggtgcggctggtggagtctgggggaggcttggtacagcctggagggttcctaagactctcctgtgcagcctctggattcacattcagtgattatgaaatgaactgggtccgccaggctccagggaaggggctggagtggatttcacacattggtagtagtgggacatacgcagactctgtgaagggccgattcaccatctccagagacaacgccaagaactcactctatctgcaaatgagcagcctgcgagccgaggacgcgggcgtttattactgtgcgactacccgaaactcagctttcctcaactggggccagggaaccctggtcaccgtctcctcagggagtgcatccgccccaacccttttccccctcgtctcctgtgagaattccccgtcggatacgagcagcgtggccgttggctgcctcgcacaggacttccttcccgactccatcactttctcctggaaatacaagaacaactctgacatcagcagcacccggggcttcccatcagtcctgagagggggcaagtacgcagccacctcacaggtgctgctgccttccaaggacgtcatgcagggcacagacgaacacgtggtgtgcaaagtccagcaccccaacggcaacaaagaaaagaacgtgcctcttcca

SEQ ID NO: 2253 - DNA, 657 bp, synthetic construct
  misc_feature 1..657: note = Synthetic polynucleotide encoding artificial human antibody VH chain
  source 1..657: mol_type = other DNA
gaggtgcagctggtggagtctgggggaggcttggtacagccgggggggtccctgagactctcctgtgcagcctctggattcccccctaggagttttgccatgagttgggtccgccaggctccagggaaggggctggagtgggtctcaagtattagtggtcttggaaatagtatatattatgcggagtccgtgaagggccgattcatcacctccagagacaattccaagagcacagtgtttctgctaatgaacagcctgagagccgaggacacggccgtatattattgtgcgaagtccgcatttgggggagttcctgatggttttgatatctggggccaagggacaatggtcaccgtctcttcagcctccaccaagggcccatcggtcttccccctggcgccctgctccaggagcacctccgagagcacagcggccctgggctgcctggtcaaggactacttccccgaaccggtgacggtgtcgtggaactcaggcgccctgaccagcggcgtgcacaccttcccggctgtcctacagtcctcaggactctactccctcagcagcgtggtgaccgtgccctccagcagcttgggcacccagacctacatctgcaacgtagatcacaagcccagcaacaccaaggtggacaagacagtg

SEQ ID NO: 2254 - DNA, 636 bp, synthetic construct
  misc_feature 1..636: note = Synthetic polynucleotide encoding artificial human antibody VH chain
  source 1..636: mol_type = other DNA
ccggtgcagctggtggagtctgggggaggcgtggtccagcctgggaggtccctgagactctcctgtgcagcctctggattcaccttcagcaactatgggatgcactgggtccgccaggctccaggcaaggggctggagtgggtggcagttatatcagatgatgggaatgataaagacaacgcagactccgtgaagggccgattcaccatctccagagacaattccaagaatacgctgtatctgcgaatgaacagcctgagacgagaggacacggctgtgtattattgtgcgagagatgggtttgactactggggccagggaaccctggtcaccgtctcctcagcctccaccaagggcccatcggtcttccccctggcaccctcctccaagagcacctctgggggcacagcggccctgggctgcctggtcaaggactacttccccgaaccggtgacggtgtcgtggaactcaggcgccctgaccagcggcgtgcacaccttcccggctgtcctacagtcctcaggactctactccctcagcagcgtggtgaccgtgccctccagcagcttgggcacccagacctacatctgcaacgtgaatcacaagcccagcaacaccaaggtggacaagaatgtg

SEQ ID NO: 2255 - DNA, 361 bp, synthetic construct
  misc_feature 1..361: note = Synthetic polynucleotide encoding artificial human antibody VH chain
  source 1..361: mol_type = other DNA
gaagtgcagctggtggagtctgggggagtcgtggtacagccgggggggtccctgagactctcctgtgcagcctctggattcacctttgatgattataccatgcactgggtccgtcaagctccggggaagggtctggaatgggtctctcttattagttgggatggtggtagcacatactatgcagactctgtgaagggccgattcaccatctccagagacaacagcaaaaactccctgtatctgcaaatgaacagtctgagaactgaagacaccgccttgtattactgtgcaaaagcgggatacagctttactaccgctcctgactactggggccagggaaccctggtcaccgtctcctcag

SEQ ID NO: 2256 - DNA, 657 bp, synthetic construct
  misc_feature 1..657: note = Synthetic polynucleotide encoding artificial human antibody VH chain
  source 1..657: mol_type = other DNA
cccgttcaattggtgcagtctggagctgaggtgaagaagcctggggcctcagtgaaggtctcctgcaaggcctctggtgacacctttcccaactatgttatcagctgggtgcgacaggcccctggacaagggcttgagtgggtgggatgtatcaacacgaacaatggtaaaacaaattatgtgcagaagctccagggcagagtcatcttgaccacagacacatccacaaacacagccaacatggagctgaggagtctgagatttgacgacacggccgtttattactgtgcgcgagagagaggccaggtccgttcctacggcatggacgtctggggccaagggaccgcggtcaccgtctcctcagcttccaccaagggcccatccgtcttccccctggcgccctgctccaggagcacctccgagagcacagccgccctgggctgcctggtcaaggactacttccccgaaccggtgacggtgtcgtggaactcaggcgccctgaccagcggcgtgcacaccttcccggctgtcctacagtcctcaggactctactccctcagcagcgtggtgaccgtgccctccagcagcttgggcacgaagacctacacctgcaacgtagatcacaagcccagcaacaccaaggtggacaagagagtg

SEQ ID NO: 2257 - DNA, 684 bp, synthetic construct
  misc_feature 1..684: note = Synthetic polynucleotide encoding artificial human antibody VH chain
  source 1..684: mol_type = other DNA
gaggttcagttggtggagtctgggggaggcttggtacagcctggcaggtccctgagactctcctgtgcagcctctggattcacatttgatgattatgccatgcactgggtccgacaacctccagggaggggcctggagtgggtctcaggtatcgattggagtggaaagaccacagagtatgcacagtctgtgaagggccgattcaccatctccagagacaacgccaagaactccctatatctgcaaatgaacagtctgagagttgaagacacggccttgtatttctgtgtaaaaattggcggggatgggacagcctacgcttggacctttaggcactttgactcctggggccagggtacccgggtcaccgtctcgtcagcatccccgaccagccccaaggtcttcccgctgagcctctgcagcacccagccagatgggaacgtggtcatcgcctgcctggtccagggcttcttcccccaggagccactcagtgtgacctggagcgaaagcggacagggcgtgaccgccagaaacttcccacccagccaggatgcctccggggacctgtacaccacgagcagccagctgaccctgccggccacacagtgcctagccggcaagtccgtgacatgccacgtgaagcactacacgaatcccagccaggatgtgactgtgccctgccca

SEQ ID NO: 2258 - DNA, 654 bp, synthetic construct
  misc_feature 1..654: note = Synthetic polynucleotide encoding artificial human antibody VH chain
  source 1..654: mol_type = other DNA
gaggtgcagctgttggagtctgggggaggcttggtacagcctggggggtccctgagactctcctgtgcagcctctggattcacctttagcagctatgccatgagctgggtccgccaggctccagggaaggggctggagtgggtctcagctattagtggtagtggtggtagcacatactacgcagactccgtgaagggccggttcaccatctccagagacaattccaagaacacgctgtatctgcaaatgaacagcctgagagccgaggacacggccgtatattactgtgcgagagggttgggtggagattggaactaccttgcctactggggccagggaaccctggtcaccgtctcctcagcttccaccaagggcccatcggtcttccccctggcgccctgctccaggagcacctctgggggcacagcggccctgggctgcctggtcaaggactacttccccgaaccggtgacggtgtcgtggaactcaggcgccctgaccagcggcgtgcacaccttcccggctgtcctacagtcctcaggactctactccctcagcagcgtggtgaccgtgccctccagcagcttgggcacccagacctacacctgcaacgtgaatcacaagcccagcaacaccaaggtggacaagagagtt

SEQ ID NO: 2259 - DNA, 678 bp, synthetic construct
  misc_feature 1..678: note = Synthetic polynucleotide encoding artificial human antibody VH chain
  source 1..678: mol_type = other DNA
caggtgcagctggtggagtctgggggaggcgtggtccagcctgggaggtccctgagactctcctgtgcagcctctggattcaccttcagtaactatgacatgcactgggtccgccaggctccaggcaaggggctggagtgggtgacagttgtatcatatgatggaactaataaatattatgcagagtccgtgcagggccgattcaccatctccagagacaattccaagaacacgctgtatctgcaaatgaacagcctgagaactgaggacacggctgtgtattactgtgcgaaagaaggtggatgggggaatacagtaactacgtcctactactactacggtatggatgtctggggccaagggaccacggtcaccgtctcctcagcctccaccaagggcccatcggtcttccccctggcaccctcctccaagagcacctctgggggcacagcggccctgggctgcctggtcaaggactacttccccgaaccggtgacggtgtcgtggaactcaggcgccctgaccagcggcgtgcacaccttcccggctgtcctacagtcctcaggactctactccctcagcagcgtggtgaccgtgccctccagcagcttgggcacccagacctacatctgcaacgtgaatcacaagcccagcaacaccaaggtggacaagagagtc

SEQ ID NO: 2260 - DNA, 657 bp, synthetic construct
  misc_feature 1..657: note = Synthetic polynucleotide encoding artificial human antibody VH chain
  source 1..657: mol_type = other DNA
gaggtgcagttggtggagtctgggggaggcctggtcaggccgggggggtccctgagactctcctgtgttggctctggattcaccttcagtccctatagtataaactgggtccgccaggctccagggaaggggctggagtgggtctcatcgattactagtaccagtagttacttagactacgcagactcagtaaagggccgattcaccatctccagagacaacgccaagaactcagtgtatctgcaaatgaacagcctgagagtcgaggacacggctgtctattactgtacgagggatgggggatacttcgcaactggcgagtttgactactggggccagggaaccatggtcaccgtctcctcagcctccaccaagggcccatcggtcttccccctggcaccctcctccaagagcacctctgggggcacagcggccctgggctgcctggtcaaggactacttccccgaaccggtgacggtgtcgtggaactcaggcgccctgaccagcggcgtgcacaccttcccggctgtcctacagtcctcaggactctactccctcagcagcgtggtgaccgtgccctccagcagcttgggcacccagacctacatctgcaacgtgaatcacaagcccagcaacaccaaggtggacaagagagct

SEQ ID NO: 2261 - DNA, 666 bp, synthetic construct
  misc_feature 1..666: note = Synthetic polynucleotide encoding artificial human antibody VH chain
  source 1..666: mol_type = other DNA
ccggtgcagctgcaggagtcgggcccaggactggtgaagccttcacagaccctgtccctcacctgcactgtctctggtggctccatcaccagtggtagttacttctggagttggatccggcagcccgccggggaggggctggagtggattgggcgtatatataccagtgggagcaccaactacaacccctccctcaagagtcgagtcaccatatcagcagacacgtccaagaaccacttctccctggagctgagctctgtgaccgccgcagacacggccatgtatttctgtgcgagagagcgctttggccaaggtgcccttgactactggggccagggaaccctggtcaccgtctcctcagcatccccgaccagccccaaggtcttcccgctgagcctcgacagcaccccccaagatgggaacgtggtcgtcgcatgcctggtccagggcttcttcccccaggagccactcagtgtgacctggagcgaaagcggacagaacgtgaccgccagaaacttcccacctagccaggatgcctccggggacctgtacaccacgagcagccagctgaccctgccggccacacagtgcccagacggcaagtccgtgacatgccacgtgaagcactacacgaattccagccaggatgtgactgtgccctgcccc

SEQ ID NO: 2262 - DNA, 663 bp, synthetic construct
  misc_feature 1..663: note = Synthetic polynucleotide encoding artificial human antibody VH chain
  source 1..663: mol_type = other DNA
cagctgcatctgcaggagtcgggcccaggactggtgaagccttcggagacactgtccctcacctgcactgtctctggtggctccgtcagcagtagtagttactactggggctgggtccgccagcccccagggaaggggctggagtggattggccatgtctattacagtgggaggacctactacaacccgtccctcaagagtcgagccaccatatccttagatacgtccaagaatcagttttccctgaagctgagctctctcaccgccacagacacggctgtctattactgtgcgaccatcgtcgctgcctacagctatggtttcgagttcgacccctggggccagggaatcctggtcatcgtctcctcagcctccaccaagggcccatcggtcttccccctggcaccctcctccaagagcacctctgggggcacagcggccctgggctgcctggtcaaggactacttccccgaaccggtgacggtgtcgtggaactcaggcgccctgaccagcggcgtgcacaccttcccggctgtcctacagtcctcaggactctactccctcagcagcgtggtgaccgtgccctccagcagcttgggcacccagacctacatctgcaacgtgaatcacaagcccagcaacaccaaggtggacaagagagcc

SEQ ID NO: 2263 - DNA, 678 bp, synthetic construct
  misc_feature 1..678: note = Synthetic polynucleotide encoding artificial human antibody VH chain
  source 1..678: mol_type = other DNA
caggtgcagctggtggagtctgggggaggcgtggtccagcctgggaggtccctgagactctcctgtgcagcctctggattcaccttcagtaactatgacatgcactgggtccgccaggctccaggcaaggggctggagtgggtgacagttgtatcatatgatggaactaataaatattatgcagagtccgtgcagggccgattcaccatctccagagacaattccaagaacacgctgtatctgcaaatgaacagcctgagaactgaggacacggctgtgtattactgtgcgaaagaaggtggatgggggaatacagtaactacgtcctactactactacggtatggatgtctggggccaagggaccacggtcaccgtctcctcagcctccaccaagggcccatcggtcttccccctggcaccctcctccaagagcacctctgggggcacagcggccctgggctgcctggtcaaggactacttccccgaaccggtgacggtgtcgtggaactcaggcgccctgaccagcggcgtgcacaccttcccggctgtcctacagtcctcaggactctactccctcagcagcgtggtgaccgtgccctccagcagcttgggcacccagacctacatctgcaacgtgaatcacaagcccagcaacaccaaggtggacaagagagtt

SEQ ID NO: 2264 - DNA, 365 bp, synthetic construct
  misc_feature 1..365: note = Synthetic polynucleotide encoding artificial human antibody VH chain
  source 1..365: mol_type = other DNA
ggttcagctggtgcagtctggagcagaggtgagaaagccgggggagtctctgacgatctcctgtaagacttctggctacgcctttatcggtaactggatcggctgggtgcgccagaggcccgggaaaggcctggagtggatcggaatgatttatcctgttgactctgataccagatatagtccgtccttccaaggccaggtcaccatctcagtcgacaagtccatcaggaccgcctatctgcagtggaacagtctgcgggcctcagacaccgccacctattattgtgcgcgacagggatttgaggctctggttattcgaggctttgactactggggccagggaaccgttgtcactgtctcctcag

SEQ ID NO: 2265 - DNA, 668 bp, synthetic construct
  misc_feature 1..668: note = Synthetic polynucleotide encoding artificial human antibody VH chain
  source 1..668: mol_type = other DNA
gtgaggggcagctgttggagtctgggggaggcttggttcagccgggggggtccctgagactctcctgtgaagcctctggattcaccttttcctttagcagttatgccatgagttgggtccgccaggctccagggaggggactggagtgggtctcagttaccggtggtagtggttataccaaatactacgcagactccgtgaagggccggttcaccgtctccagagacaattccaagaacaccctctatctgcaaatgaacagcctgcgagccgaggacacggccctatattactgtgcgaggagatctaccagtagcccctctttcagcactctggacgtctggggccgaggggccacggtcatcgtctcctcagcctccaccaagggcccatcggtcttccccctggcaccctcctccaagagcacctctgggggcacagcggccctgggctgcctggtcaaggactacttccccgaaccggtgacggtgtcgtggaactcaggcgccctgaccagcggcgtgcacaccttcccggctgtcctacagtcctcaggactctactccctcagcagcgtggtgaccgtgccctccagcagcttgggcacccagacctacatctgcaacgtgaatcacaagcccagcaacaccaaggtggacaagagtgag

SEQ ID NO: 2266 - DNA, 645 bp, synthetic construct
  misc_feature 1..645: note = Synthetic polynucleotide encoding artificial human antibody VH chain
  source 1..645: mol_type = other DNA
gtggtgcagctggtggagtctgggggaggcttggtacagcctggagggtccctgagactctcctgtgcagcctctggattcaccttcaataattatgaaatgaactgggtccgccaggctccagggaaggggctggagtgggtttcatacattagtagtagtggtagtaccatatactatgcagactctgtgaagggccgattcaccatctccagagacaacgccaagaactcactgtatctgcaaatgaacagcctgagagccgaggacacggctgtttattactgtgcgagacaaatggtgactacgaggggctactggggccagggaaccctggtcaccgtctcctcagcctccaccaagggcccatcggtcttccccctggcaccctcctccaagagcacctctgggggcacagcggccctgggctgcctggtcaaggactacttccccgaaccggtgacggtgtcgtggaactcaggcgccctgaccagcggcgtgcacaccttcccggctgtcctacagtcctcaggactctactccctcagcagcgtggtgaccgtgccctccagcagcttgggcacccagacctacatctgcaacgtgaatcacaagcccagcaacaccaaggtggacaagaatgtg

SEQ ID NO: 2267 - DNA, 663 bp, synthetic construct
  misc_feature 1..663: note = Synthetic polynucleotide encoding artificial human antibody VH chain
  source 1..663: mol_type = other DNA
gaggtgcagctggtggagtctgggggaggcttggtccagcctggggggtccctgagactctcctgtgcagcctctggattcacctttagtagcaattggatgagctgggtccgccaggctccagggaaggggctggagtgggtggccaacataaaggaagatggaagtgagaaatactacgtggactctgtgaagggccgattcaccatttttagagacaacgccaagaactcactgtatctgcaaatgaacagcctgagagccgaggacacggctgtgtattactgtgcgagagtcccatctcgctatggccgttccaggggcgcttttgatatctggggccaagggacaatggtcaccgtctcttcagcctccaccaagggcccatcggtcttccccctggcaccctcctccaagagcacctctgggggcacagcggccctgggctgcctggtcaaggactacttccccgaaccggtgacggtgtcgtggaactcaggcgccctgaccagcggcgtgcacaccttcccggctgtcctacagtcctcaggactctactccctcagcagcgtggtgaccgtgccctccagcagcttgggcacccagacctacatctgcaacgtgaatcacaagcccagcaacaccaaggtggacaagagagtg

SEQ ID NO: 2268 - DNA, 656 bp, synthetic construct
  misc_feature 1..656: note = Synthetic polynucleotide encoding artificial human antibody VH chain
  source 1..656: mol_type = other DNA
cccaggtgcagctgcaggagtcgggcccaggactggtgaagccttcacagaccctgtccctcacctgcactgtctctggtggctccatcagcagtggtggttactactggagctggatccgccagcacccagggaagggcctggagtggattgggtacatctattacagtgggagcacctactacaacccgtccctcaagagtctagttaccatatcagtagacacgtctaagaaccagttctccctgaagctgagctctgtgactgccgcggacacggccgtgtattactgtgcgagaaatctttatcgtctgggctggttcgacccctggggccagggaaccctggtcaccgtctcctcagcctccaccaagggcccatcggtcttccccctggcaccctcctccaagagcacctctgggggcacagcggccctgggctgcctggtcaaggactacttccccgaaccggtgacggtgtcgtggaactcaggcgccctgaccagcggcgtgcacaccttcccggctgtcctacagtcctcaggactctactccctcagcagcgtggtgaccgtgccctccagcagcttgggcacccagacctacatctgcaacgtgaatcacaagcccagcaacaccaaggtggacaagaaagtg

SEQ ID NO: 2269 - DNA, 654 bp, synthetic construct
  misc_feature 1..654: note = Synthetic polynucleotide encoding artificial human antibody VH chain
  source 1..654: mol_type = other DNA
caggtgcagctggtggagtctgggggaggcgtggtccagcctgggaggtccctgagactctcctgtgcagcctctggattcacgttcagtagctatggcatgcactgggtccgtcaggctccaggcaaggggctggagtgggtggcaattatatcatatgatggaagtaataaatattatgcagactccgtgaagggccgattcaccatctccagagacaaatccaagaacacgctgtatctgcaaatgaacagcctgagagctgaggacacggctgtgtattactgtgcgaaatcgaaaggtaactaccgggacgctatggacgtctggggccaagggaccacggtcaccgtctcctcagcctccaccaagggcccatcggtcttccccctggcaccctcctccaagagcacctctgggggcacagcggccctgggctgcctggtcaaggactacttccccgaaccggtgacggtgtcgtggaactcaggcgccctgaccagcggcgtgcacaccttcccggctgtcctacagtcctcaggactctactccctcagcagcgtggtgaccgtgccctccagcagcttgggcacccagacctacatctgcaacgtgaatcacaagcccagcaacaccaaggtggacaagagagtt

SEQ ID NO: 2270 - DNA, 657 bp, synthetic construct
  misc_feature 1..657: note = Synthetic polynucleotide encoding artificial human antibody VH chain
  source 1..657: mol_type = other DNA
caggtgcttctggtggagtctgggggcggcttggtcaagcctggagggtccctgagactctcctgtgcagcctctggattcaccttcagtgactactacatgagctggatccgccaggctccagggaaggggctggagtgggtttcatacattggtagtagtactactgccatatactacgcagactctgtgaagggccgattcaccatctcccgggacaacgccaggaactcgctgtatctgcaaatgaacagcctgcgagccgaggacacggccgtgtattactgtgcgacctcatatacagtaacgactttctacggtatggacgtctggggccaagggaccacggtcaccgtctcctcagcctccaccaagggcccatcggtcttccccctggcaccctcctccaagagcacctctgggggcacagcggccctgggctgcctggtcaaggactacttccccgaaccggtgacggtgtcgtggaactcaggcgccctgaccagcggcgtgcacaccttcccggctgtcctacagtcctcaggactctactccctcagcagcgtggtgaccgtgccctccagcagcttgggcacccagacctacatctgcaacgtgaatcacaagcccagcaacaccaaggtggacaagagagtg

SEQ ID NO: 2271 - DNA, 656 bp, synthetic construct
  misc_feature 1..656: note = Synthetic polynucleotide encoding artificial human antibody VH chain
  source 1..656: mol_type = other DNA
cccaggtgcagctgcaggagtcgggcccagggctggtgaagccttcacagaccctgtccctcacctgcgctgtctctggtggctccatcagcagtggtggttacccctggagctggatccggcagccaccagggaagggactggagtggattgggtatatctcttacagtgggagcaccgactacaacccgtccctcaagagtcgagttaccatatcgctggacacgtccagtaaccagttctccctgaacctgtcctctctgaccgccgcggacacggccgtgtattactgtgccagaggggcggccttctactacggtatggacgtctggggccaagggaccacggtcaccgtctcctcagcctccaccaagggcccatcggtcttccccctggcaccctcctccaagagcacctctgggggcacagcggccctgggctgcctggtcaaggactacttccccgaaccggtgacggtgtcgtggaactcaggcgccctgaccagcggcgtgcacaccttcccggctgtcctacagtcctcaggactctactccctcagcagcgtggtgaccgtgccctccagcagcttgggcacccagacctacatctgcaacgtgaatcacaagcccagcaacaccaaggtggacaagagagtg

SEQ ID NO: 2272 - DNA, 657 bp, synthetic construct
  misc_feature 1..657: note = Synthetic polynucleotide encoding artificial human antibody VH chain
  source 1..657: mol_type = other DNA
caggtgcagctgcaggagtcgggcccaggactggtgaagccttcggagaccctgtccctcacctgcactgtctctggtggctccatcagtatttactactggagctggatccggcagcccccagggaagggactggagtggattggatatatctattatagtgggagcaccaactacaacccctccctcaagagtcgagtcaccatatcagtagacacgtccaagaaccagttctccctgaagctgaggtctgtgaccgctgcggacacggccgtgtattactgtgcgagagatacctacggtgacccgaggggtgactactttgactactggggccagggaaccctggtcaccgtctcctcagcctccaccaagggcccatcggtcttccccctggcaccctcctccaagagcacctctgggggcacagcggccctgggctgcctggtcaaggactacttccccgaaccggtgacggtgtcgtggaactcaggcgccctgaccagcggcgtgcacaccttcccggctgtcctacagtcctcaggactctactccctcagcagcgtggtgaccgtgccctccagcagcttgggcacccagacctacatctgcaacgtgaatcacaagcccagcaacaccaaggtggacaagaaagtg

SEQ ID NO: 2273 - DNA, 370 bp, synthetic construct
  misc_feature 1..370: note = Synthetic polynucleotide encoding artificial human antibody VH chain
  source 1..370: mol_type = other DNA
caggtgcagctacaggagtcgggcccaggactggtgaagccttcggagaccctgtccctcacctgcactgtcgctaatagctccatcagtagttactactggagctgggtccggcagcccccagggaaggcactggagtggattggatatatctcttattctgggagcaccaactacaacccctccctcaagagtcgagtcaccatgtcactagacacgcccaagagccagttctccctaaacctgagctctgtgaccggcgcagacacggccatatattactgtgcgagactgtggggtagcggtgactggtggccctccctgtattttgactcctggggccagggaaccctggtcaccgtctcctcag

SEQ ID NO: 2274 - DNA, 654 bp, synthetic construct
  misc_feature 1..654: note = Synthetic polynucleotide encoding artificial human antibody VH chain
  source 1..654: mol_type = other DNA
gtggtgcagctggtggagtctgggggaggcttggtccagcctggggggtccctgagactctcctgtgcagcctctggattcacctttaatagctattggatgagctgggtccgccaggctccagggaaggggctggagtgggtggccaacataaagcaagatggaagtgagaaatactatgtggactctgtgaagggccgattcaccatctccagagacaacgccaagaactcactgtatctgcaaatgaacagcctgagagccgaggacacggctgtgtattactgtgcgagaatccggcgtatagcagcaactagttttgactactggggccagggaaccctggtcaccgtctcctcagcctccaccaagggcccatcggtcttccccctggcaccctcctccaagagcacctctgggggcacagcggccctgggctgcctggtcaaggactacttccccgaaccggtgacggtgtcgtggaactcaggcgccctgaccagcggcgtgcacaccttcccggctgtcctacagtcctcaggactctactccctcagcagcgtggtgaccgtgccctccagcagcttgggcacccagacctacatctgcaacgtgaatcacaagcccagcaacaccaaggtggacaagaatgtg

SEQ ID NO: 2275 - DNA, 675 bp, synthetic construct
  misc_feature 1..675: note = Synthetic polynucleotide encoding artificial human antibody VH chain
  source 1..675: mol_type = other DNA
gaagtgcagctggtggagtctgggggaggcttggtacagcctggcaggtccctgagactctcctgtgcagcctctggattcacctttgatgattatgccatgcactgggtccggcaagctccagggaagggcctggagtgggtctcaggtattagttggaatagtggtagtataggctatgcggactctgtgaagggccgattcaccatctccagagacaacgccaagaactccctgtatctgcaaatgaacagtctgagagctgaggacacggccttgtattactgtgcaaaaatagcacgtcgtcctcccagtttttacgactacatggacgtctggggcaaagggaccacggtcaccgtctcctcagcatccccgaccagccccaaggtcttcccgctgagcctctgcagcacccagccagatgggaacgtggtcatcgcctgcctggtccagggcttcttcccccaggagccactcagtgtgacctggagcgaaagcggacagggcgtgaccgccagaaacttcccacccagccaggatgcctccggggacctgtacaccacgagcagccagctgaccctgccggccacacagtgcctagccggcaagtccgtgacatgccacgtgaagcactacacgaatcccagccaggatgtgactgtgccctgccca

SEQ ID NO: 2276 - DNA, 675 bp, synthetic construct
  misc_feature 1..675: note = Synthetic polynucleotide encoding artificial human antibody VH chain
  source 1..675: mol_type = other DNA
gaggtgcagctggtgcagtctggagcagaggtgaaaaagccgggggagtctctgaagatctcctgtcagggttctggttacaggtttaacgcctactggatcggctgggtgcgccagatccccgggaaaggcctggagtggatggggatcatctatcctggtgactctgataccaaatacagcccatccttccaaggccaggtcaccatctcagccgacaagtccatcagcaccgcctacctgcagtggaacggcctggaggcctcggacaccgccgtctattactgtgcgaggtcgacaagtagttccacctccgacttccactacatggacgtatggggcaaggggaccacggtcaccatctcctcagcatccccgaccagccccaaggtcttcccgctgagcctctgcagcacccagccagatgggaacgtggtcatcgcctgcctggtccagggcttcttcccccaggagccactcagtgtgacctggagcgaaagcggacagggcgtgaccgccagaaacttcccacccagccaggatgcctccggggacctgtacaccacgagcagccagctgaccctgccggccacacagtgcctagccggcaagtccgtgacatgccacgtgaagcactacacgaatcccagccaggatgtgactgtgccctgccca

SEQ ID NO: 2277 - DNA, 654 bp, synthetic construct
  misc_feature 1..654: note = Synthetic polynucleotide encoding artificial human antibody VH chain
  source 1..654: mol_type = other DNA
cacgtacaactgctacagtccggtccaggactggtgaagccctcgcagaccctctcactcacctgtgccatctccggggacagtgtctctagtaccagtggtgcttggaactggatcaggcagtccccatcgagaggccttgagtggctgggaaggacatactacaggtcccagtggatgaatgattatgcagaatctgtgagaagtcgaataaccatcaaccctgacacatccaagaaccaattctccctgcagttgaaatctgtgactcccgaggacacggctgtttattactgtacaagaggatgggcattcaccagctccgactggggccagggaacccaggtcaccgtctcctcagcctccaccaagggcccatcggtcttccccctggcgccctgctccaggagcacctccgagagcacagcggccctgggctgcctggtcaaggactacttccccgaaccggtgacggtgtcgtggaactcaggcgctctgaccagcggcgtgcacaccttcccagctgtcctacagtcctcaggactctactccctcagcagcgtggtgaccgtgccctccagcaacttcggcacccagacctacacctgcaacgtagatcacaagcccagcaacaccaaggtggacaagacagtg

SEQ ID NO: 2278 - DNA, 666 bp, synthetic construct
  misc_feature 1..666: note = Synthetic polynucleotide encoding artificial human antibody VH chain
  source 1..666: mol_type = other DNA
cacgtacacctgcagcagtcaggtccaggactggtgacgccctcgcagaccctctcactcacctgtgccatctccggggacagtgtctctagcaacagtgctgcttggaactggatcaggcagtccccatcgagaggccttgagtggctgggaaggacatactacaggtccaagtggtataatgactatgcagtatctgtgaaaagtcgaataaccttcaaggcagacacgtccaagaaccagttctccctgcagctggactctgtgactcccgacgacacggctgtgtattactgtgcaggaggatgggcccttggctactggggccagggaaccctggtcaccgtctcctcagggagtgcatccgccccaacccttttccccctcgtctcctgtgagaattccccgtcggatacgagcagcgtggccgttggctgcctcgcacaggacttccttcccgactccatcactttctcctggaaatacaagaacaactctgacatcagcagcacccggggcttcccatcagtcctgagagggggcaagtacgcagccacctcacaggtgctgctgccttccaaggaggtcatgcagggcacagacgaacacgtggtgtgcaaagtccagcaccccaacggcaacaaagaaaagaacgtgcctcttcca

SEQ ID NO: 2279 - DNA, 349 bp, synthetic construct
  misc_feature 1..349: note = Synthetic polynucleotide encoding artificial human antibody VH chain
  source 1..349: mol_type = other DNA
cccgtgcagctgcaggagtcgggcccaggactggtgaagccttcggagaccctgtccctcacctgcactgtctctggtggctccatcagtagttactactggagctggatccggcagcccccagggaagggactggagtggattgggtatctcttttacagtgggagcaccaactacaacccctccctcaagagtcgagtcaccatatcagtagacacgtccaagaaccagttctccctgaagttgggctctgtgaccgccgcagacacggccgtgtattactgtgcgagacaccgaattttcggtttggacgtctggggccaagggaccacggtcaccgtctcctcag

SEQ ID NO: 2280 - DNA, 691 bp, synthetic construct
  misc_feature 1..691: note = Synthetic polynucleotide encoding artificial human antibody VH chain
  source 1..691: mol_type = other DNA
ctgtgccgaggtgcagctggtgcagtctggagcagaggtgaaaaagcccggggagtctctgaagatctcctgtaagggttctggatacagctttaccagctactggatcggctgggtgcgccagatgcccgggaaaggcctggagtggatggggatcatctatcctggtgactctgataccagatacagcccgtccttccaaggccaggtcaccatctcagccgacaagtccatcagcaccgcctacctgcagtggagcagcctgaaggcctcggacaccgccatgtattactgtgcgagacgcggaccgaccgatacatggtcaggggaagttggctactactttgactactggggccagggaaccctggtcaccgtctcctcagcatccccgaccagccccaaggtcttcccgctgagcctctgcagcacccagccagatgggaacgtggtcatcgcctgcctggtccagggcttcttcccccaggagccactcagtgtgacctggagcgaaagcggacagggcgtgaccgccagaaacttcccacccagccaggatgcctccggggacctgtacaccacgagcagccagctgaccctgccggccacacagtgcctagccggcaagtccgtgacatgccacgtgaagcactacacgaatcccagccaggatgtgactgtgccctgcccg

SEQ ID NO: 2281 - DNA, 669 bp, synthetic construct
  misc_feature 1..669: note = Synthetic polynucleotide encoding artificial human antibody VH chain
  source 1..669: mol_type = other DNA
cagtgtcaggtgcagctggtggagtctgggggaggcgtggtccagcctgggaggtccctgagactctcctgtgcagcgtctggattcaccttcagtagctatggcatgcactgggtccgccaggctccaggcaaggggctggagtgggtggcagttatatggtatgatggaagtaataaatactatgcagactccgtgaagggccgattcaccatctccagagacaattccaagaacacgctgtatctgcaaatgaacagcctgagagccgaggacacggctgtgtattactgtgcgagagatggaaaaacattagggtacggtggtaactccgttgactactggggccagggaaccctggtcaccgtctcctcagcctccaccaagggcccatcggtcttccccctggcaccctcctccaagagcacctctgggggcacagcggccctgggctgcctggtcaaggactacttccccgaaccggtgacggtgtcgtggaactcaggcgccctgaccagcggcgtgcacaccttcccggctgtcctacagtcctcaggactctactccctcagcagcgtggtgaccgtgccctccagcagcttgggcacccagacctacatctgcaacgtgaatcacaagcccagcaacaccaaggtggacaagaaggtg

SEQ ID NO: 2282 - DNA, 672 bp, synthetic construct
  misc_feature 1..672: note = Synthetic polynucleotide encoding artificial human antibody VH chain
  source 1..672: mol_type = other DNA
gaggtgcagctggtggagtctgggggaggcctggtcaagccgggggggtccctgagactctcctgtgcagtctctgggttcactttcagatcctacagcatgaactgggtccgccaggctccagggaaggggctggagtgggtctcatccattagtagcagtagtcgttacgtggactacgcagactcagtgaagggccgattcaccatctctagagacaacgccaagaacttactgtatctgcaaatgaacttcctgagagtcgaggacacggctgtgtattactgtgctcggacagaaactaaatgggaggacagggggctttgggactactggggccagggaaccctggtcaccgtctcctcagcatccccgaccagccccaaggtcttcccgctgagcctctgcagcacccagccagatgggaacgtggtcatcgcctgcctggtccagggcttcttcccccaggagccactcagtgtgacctggagcgaaagcggacagggcgtgaccgccagaaacttcccacccagccaggatgcctccggggacctgtacaccacgagcagccagctgaccctgccggccacacagtgcctagccggcaagtccgtgacatgccacgtgaagcactacacgaatcccagccaggatgtgactgtgccctgccca

SEQ ID NO: 2283 - DNA, 645 bp, synthetic construct
  misc_feature 1..645: note = Synthetic polynucleotide encoding artificial human antibody VH chain
  source 1..645: mol_type = other DNA
caggtccagctggtgcaatctggggctgaggtgaagaagcctgggtcctcggtgaaggtctcctgcaagacttctggaggcaccttcagcagttatactatcagctgggtgcgacaggcccctggacaagggcctgagtggatgggaaggatcatccctatacttaatataacaaactacgcgcagaagttccagggcagagtcacgattaccgcggacaaatccacgagcacaacctacatggagatgggcagcctgagatctgaggacacggccgtgtatttctgtgcgagatcgttttatggttcaggtttgcagtggggccagggaaccctggtcaccgtctcctcagcctccaccaagggcccatcggtcttccccctggcaccctcctccaagagcacctctgggggcacagcggccctgggctgcctggtcaaggactacttccccgaaccggtgacggtgtcgtggaactcaggcgccctgaccagcggcgtgcacaccttcccggctgtcctacagtcctcaggactctactccctcagcagcgtggtgaccgtgccctccagcagcttgggcacccagacctacatctgcaacgtgaatcacaagcccagcaacaccaaggtggacaagagagtg

SEQ ID NO: 2284 - DNA, 654 bp, synthetic construct
  misc_feature 1..654: note = Synthetic polynucleotide encoding artificial human antibody VH chain
  source 1..654: mol_type = other DNA
ggggtggacctggtggagtctgggggaggcctggtcaagcctggggggtccctgagactctcctgtgcagcctctggattcagcttcagcagatataatataaactgggttcggcaggctccagggaaggggctggagtgggtctcatccattagtagtactagcaattacatatactacgcggactctgtgaagggccggttcaccatctccagagacaacgccaagaactcactctatctgcaaatgaacagcctgagagccgaggacacggctgtgtattactgtgcgagggccatgggtggctacacttactaccttgacgactggggccagggaaccctggtcaccgtctcctcagcctccaccaagggcccatcggtcttccccctggcaccctcctccaagagcacctctgggggcacagcggccctgggctgcctggtcaaggactacttccccgaaccggtgacggtgtcgtggaactcaggcgccctgaccagcggcgtgcacaccttcccggctgtcctacagtcctcaggactctactccctcagcagcgtggtgaccgtgccctccagcagcttgggcacccagacctacatctgcaacgtgaatcacaagcccagcaacaccaaggtggacaagaaggtg

SEQ ID NO: 2285 - DNA, 666 bp, synthetic construct
  misc_feature 1..666: note = Synthetic polynucleotide encoding artificial human antibody VH chain
  source 1..666: mol_type = other DNA
caggtgcagttggtggaatctgggggaggcgtggtccagcctgggaggtccctgagactctcctgtgcagcctctggattcaccttcactaattatgccatacactgggtccgccaggctccagacaaggggctggagtgggtgtcagttatttcatatgatggaagtgatgaatactacgcagactccgtgaagggccgattcaccatctccagagacaattccaagaacacggtttatctgcaaatgagcagcctgagagctgaggacacggctgtctatcgctgtgcgagggcggggaaagacggctacaattttttctactacggtatggacgtctggggccaagggaccacggtcagcgtctcctcaccctccaccaagggcccatcggtcttccccctggcaccctcctccaagagcacctctgggggcacagcggccctgggctgcctggtcaaggactacttccccgaaccggtgacggtgtcgtggaactcaggcgccctgaccagcggcgtgcacaccttcccggctgtcctacagtcctcaggactctactccctcagcagcgtggtgaccgtgccctccagcagcttgggcacccagacctacatctgcaacgtgaatcacaagcccagcaacaccaaggtggacaagaagttg

SEQ ID NO: 2286 - DNA, 660 bp, synthetic construct
  misc_feature 1..660: note = Synthetic polynucleotide encoding artificial human antibody VH chain
  source 1..660: mol_type = other DNA
caggtgcagttggtggagtctgggggaggcgtggtccagcctgggaggtccctgagactctcgtgtgcagcgtctggattctccttcagtagttttggcatgcactgggtccgccaggctccaggcaaggggctggagtgggtggcagttatatggcatgatggaagtcataaatctcatgcagactccgtgaagggccgattcaccatctccagagacaattccaagaacacggtgtatctacaaatgaacagcctgggagccgaggacacggctgtatattactgtgcgagagggatcatgactacagcaatttcctactactttgactactggggccagggaaccctggtcaccgtctcctcagcctccaccaagggcccatcggtcttccccctggcaccctcctccaagagcacctctgggggcacagcggccctgggctgcctggtcaaggactacttccccgaaccggtgacggtgtcgtggaactcaggcgccctgaccagcggcgtgcacaccttcccggctgtcctacagtcctcaggactctactccctcagcagcgtggtgaccgtgccctccagcagcttgggcacccagacctacatctgcaacgtgaatcacaagcccagcaacaccaaggtggacaagagagtt

SEQ ID NO: 2287 - DNA, 376 bp, synthetic construct
  misc_feature 1..376: note = Synthetic polynucleotide encoding artificial human antibody VH chain
  source 1..376: mol_type = other DNA
gaggtgcagctgttgcagtctgggggaggcttggtccagcctggggggtccctgagactctcctgtgcagcctctggattcacatttagctcgtatgccgtgacctgggtccgccaggctccagggaaggggctggagtgggtctcaacgattagtggtgatggtcgtagcacatatttcgcagactccgtgaagggccgtttcgccatctacagagacaattccaagaacacgctgtctctgctattgaacagcctgagagccgaggacacggccgtatattactgtgcgaaaggagaaagggacctgacagactacggtgaccccgaatatttccagcactggggccagggcaccctggtcaccgtctcctcag

SEQ ID NO: 2288 - DNA, 376 bp, synthetic construct
  misc_feature 1..376: note = Synthetic polynucleotide encoding artificial human antibody VH chain
  source 1..376: mol_type = other DNA
caggtgcaagtggtggagtctgggggaggcgtggtccagcctgggaggtccctgagactctcctgtgtagcctctggattcaccttcagtagtcatggcatgcactgggtccgccaggctccaggcaaggggctggagtgggtggcggttatatcagatgatggaaaaaataaatactatggagactccgtgcagggccgatttgtcatctccagagacaattccaagaacacgatatatctacagatgtacgacctgagggctgaggacacggctgtctattactgtgcgaaagatctgcgatattgtagcgctcgtagtagttgttttggcattgacttctggggccagggaaccctagtcaccgtctcctcag

SEQ ID NO: 2289 - DNA, 642 bp, synthetic construct
  misc_feature 1..642: note = Synthetic polynucleotide encoding artificial human antibody VH chain
  source 1..642: mol_type = other DNA
gtggtgcaactggtggagtctgggggaggcttggtccagcctggggggtccctgagactctcctgtgcagcctctggattcagctttagtacctattggatgagctgggtccgccaggctccagggaaggggctagagtgggtggccaacataaagcaagatgggagtgagaaacactatgtggactctgtgaagggccgattcaccatctccagagacaacgccaagaactcactgtatctgcaaatgaatagcctgagagccgaggacacggctatgtattattgtgcgagaagagcatacagctttgactactggggccagggaaccttggtcaccgtctcctcagcctccaccaagggcccatcggtcttccccctggcaccctcctccaagagcacctctgggggcacagcggccctgggctgcctggtcaaggactacttccccgaaccggtgacggtgtcgtggaactcaggcgccctgaccagcggcgtgcacaccttcccggctgtcctacagtcctcaggactctactccctcagcagcgtggtgaccgtgccctccagcagcttgggcacccagacctacatctgcaacgtgaatcacaagcccagcaacaccaaggtggacaagagtgag

SEQ ID NO: 2290 - DNA, 669 bp, synthetic construct
  misc_feature 1..669: note = Synthetic polynucleotide encoding artificial human antibody VH chain
  source 1..669: mol_type = other DNA
gaggtgcagctggtggagtccgggggaggcttagttcagcctggggggtccctgagactctcctgtgcagcctctggattcaccttcaataactactggatgcactgggtccgccaagctccagggaagggactggtgtgggtctcacgtatttccagtgatgggagtaccacagcctccgcggactccgtgaagggccgattcaccatctccagagacaacgccaagaacacactatttctccaaatgaacagtctgagagccgaggacacggctgtgtattattgtgcaagagagggggccccagatgactacggtgactccgggactgcttttgatatttggggccaagggacaacggtcaccgtctcttcagcctccaccaagggcccatcggtcttccccctggcaccctcctccaagagcacctctgggggcacagcggccctgggctgcctggtcaaggactacttccccgaaccggtgacggtgtcgtggaactcaggcgccctgaccagcggcgtgcacaccttcccggctgtcctacagtcctcaggactctactccctcagcagcgtggtgaccgtgccctccagcagcttgggcacccagacctacatctgcaacgtgaatcacaagcccagcaacaccaaggtggacaagaaggtg

SEQ ID NO: 2291 - DNA, 659 bp, synthetic construct
  misc_feature 1..659: note = Synthetic polynucleotide encoding artificial human antibody VH chain
  source 1..659: mol_type = other DNA
gcgaggtgcacctggtgcagtctgggggaggcttggtaaagcctggggggtcccttagactctcctgtgcagcctctggatttactttcagtcacggctggatgagctgggtccgccaggctccagggaagggactggagtgggttgcccgtattaggagcaaaaccgatggtgggactacagactacgctgctcccgtgaatggcagattcaccatctccagagacatttctattgagactctgtatttgcaaatggacagcctgaaaaccgaggacacagccgtctattactgtaccaccgatcacccctatggtgactactctgacaactggggccagggagtcctggtcaccgtctcctcagcctccaccaagggcccatcggtcttccccctggcaccctcctccaagagcacctctgggggcacagcggccctgggctgcctggtcaaggactacttccccgaaccggtgacggtgtcgtggaactcaggcgccctgaccagcggcgtgcacaccttcccggctgtcctacagtcctcaggactctactccctcagcagcgtggtgaccgtgccctccagcagcttgggcacccagacctacatctgcaacgtgaatcacaagcccagcaacaccaaggtggacaagagtgag

SEQ ID NO: 2292 - DNA, 656 bp, synthetic construct
  misc_feature 1..656: note = Synthetic polynucleotide encoding artificial human antibody VH chain
  source 1..656: mol_type = other DNA
cccaggtgcagctgcaggagtcgggcccaggactggtgaagccttcggagaccctgtccctcacctgcactgtctccggtggctccatcagaaatgactactggagttggatccggcagtccccggggaagggactggagtggattgggtacatctctgacattggggacaccaactacaacccctctttcaagagtcgaatctccatatcactggacacgtccaagaaccagttctccctgaagctgaactctgtgaccgctgcggacacggccgtctattactgtgcgaaggaattattagggggttttgactattggggccagggaacccttgtcgccgtctccacagcatccccgaccagccccaaggtcttcccgctgagcctctgcagcacccagccagatgggaacgtggtcatcgcctgcctggtccagggcttcttcccccaggagccactcagtgtgacctggagcgaaagcggacagggcgtgaccgccagaaacttcccacccagccaggatgcctccggggacctgtacaccacgagcagccagctgaccctgccggccacacagtgcctagccggcaagtccgtgacatgccacgtgaagcactacacgaatcccagccaggatgtgactgtgccctgcccg

SEQ ID NO: 2293 - DNA, 656 bp, synthetic construct
  misc_feature 1..656: note = Synthetic polynucleotide encoding artificial human antibody VH chain
  source 1..656: mol_type = other DNA
cccaggtgcagctggtgcagtctggggctgaggtgaagaagcctgggtcctcggtgaaggtctcctgcaaggcttctggaggcaccttcagcagctatgctatcagctgggtgcgacaggcccctggacaagggcttgagtggatgggagggatcatccccatctttggtacagcaaactacgcacagaagttccagggcagagtcacgattaccgcggacgaatccacgagcacagcctacatggagctgagcagcctgagatctgaggacacggccgtgtattactgtgcgagagtttttggatcagcagctggtgcttttgatatctggggccaagggacaatggtcaccgtctcttcagcctccaccaagggcccatcggtcttccccctggcaccctcctccaagagcacctctgggggcacagcggccctgggctgcctggtcaaggactacttccccgaaccggtgacggtgtcgtggaactcaggcgccctgaccagcggcgtgcacaccttcccggctgtcctacagtcctcaggactctactccctcagcagcgtggtgaccgtgccctccagcagcttgggcacccagacctacatctgcaacgtgaatcacaagcccagcaacaccaaggtggacaagagtgag

SEQ ID NO: 2294 - DNA, 654 bp, synthetic construct
  misc_feature 1..654: note = Synthetic polynucleotide encoding artificial human antibody VH chain
  source 1..654: mol_type = other DNA
cccctgcagctgcatgagtcgggcccaggactggtgaagccttcggagaccctgtccctcacctgctctgtctctggtggctccatcagcagtagtaattacttctggggctggatccgccagtccccagggatggggctggagtggattgggagtatctattttagtgggaaaactcactacaacccgtcgctcaagagtcgagtcaccatatccgtagatacgtccaagaatcacttctccctgaagctgagctctgtgaccgccgcagacacggctgttttcttctgtgcgagacacgattggcgcttatacgcatttgactactggggcctcggaaccctggtcaccgtctcctcagcctccaccaagggcccatcggtcttccccctggcaccctcctccaagagcacctctgggggcacagcggccctgggctgcctggtcaaggactacttccccgaaccggtgacggtgtcgtggaactcaggcgccctgaccagcggcgtgcacaccttcccggctgtcctacagtcctcaggactctactccctcagcagcgtggtgaccgtgccctccagcagcttgggcacccagacctacatctgcaacgtgaatcacaagcccagcaacaccaaggtggacaagagtgag

SEQ ID NO: 2295 - DNA, 660 bp, synthetic construct
  misc_feature 1..660: note = Synthetic polynucleotide encoding artificial human antibody VH chain
  source 1..660: mol_type = other DNA
gtggtgcagctggtggagtccgggggaggcttagttcagcctggggggtccctgagactctcctgtgcaggctctggatttaccttcagtgactactggatgcactgggtccgccaagctccagggaaggggctggtgtgggtctcaactattaatcgtgatgggagttacacaaaccacgcggactccgtgaagggccgattcaccatctccagagacaacgccaggagcacgctgtttctgcaaatgagcagtctcagagtcgaggacacggctgtgtattactgtgcaggaggggaaaccagtcctgactactggggccagggaaccctggtcaccgtctcctcagggagtgcatccgccccaacccttttccccctcgtctcctgtgagaattccccgtcggatacgagcagcgtggccgttggctgcctcgcacaggacttccttcccgactccatcactttctcctggaaatacaagaacaactctgacatcagcagcacccggggcttcccatcagtcctgagagggggcaagtacgcagccacctcacaggtgctgctgccttccaaggacgtcatgcagggcacagacgaacacgtggtgtgcaaagtccagcaccccaacggcaacaaagaaaagaacgtgcctcttcca

SEQ ID NO: 2296 - DNA, 665 bp, synthetic construct
  misc_feature 1..665: note = Synthetic polynucleotide encoding artificial human antibody VH chain
  source 1..665: mol_type = other DNA
cccaactgcagctgcaggagtcgggcccaggactggtgaagccttcggagaccctgtccctcacctgcactgtctctgatgtctccatcatcagtagtttctattactggggctggatccgccagccccccgggaaggggctagagtggattgggagtgtctattatagtgggagcacctcctacaacccgtccctgaagagccgcgtcaccatatccgcagacacgtccaaggcacatttctccctgaacctgaggtctgtgaccgccgcagacacggctgtttattattgtgtgagtagggggcccctagggggagcagcagctggaccggactactggggccagggagcccttgtcatcgtctcctcagcctccaccaagggcccatcggtcttccccctggcaccctcctccaagagcacctctgggggcacagcggccctgggctgcctggtcaaggactacttccccgaaccggtgacggtgtcgtggaactcaggcgccctgaccagcggcgtgcacaccttcccggctgtcctacagtcctcaggactctactccctcagcagcgtggtgaccgtgccctccagcagcttgggcacccagacctacatctgcaacgtgaatcacaagcccagcaacaccaaggtggacaagagagtt

SEQ ID NO: 2297 - DNA, 648 bp, synthetic construct
  misc_feature 1..648: note = Synthetic polynucleotide encoding artificial human antibody VH chain
  source 1..648: mol_type = other DNA
caggtgcggctgcaggagtcgggcccaggactggtgaagccttcacagaccctgtccctcacctgcactgtctctggtgcctccgtttccagtggttcttactactgggcttgggtccggcagtccgccgcgaagggactggagtggattgggcgtgtgtctcccagcgggactaacaactacaacaccgcgctgaagagccgggtcaccatatccctggacacggcgaggaaccagttctccctgacagtgacctctgtgaccgccgaagacacggccatctattactgtgcgcgagatgtccgagggtggttcgtcccctggggccagggtagcctggtcaccgtctcctcagcctccaccaagggcccatcggtcttccccctggcaccctcctccaagagcacctctgggggcacagcggccctgggctgcctggtcaaggactacttccccgaaccggtgacggtgtcgtggaactcaggcgccctgaccagcggcgtgcacaccttcccggctgtcctacagtcctcaggactctactccctcagcagcgtggtgaccgtgccctccagcagcttgggcacccagacctacatctgcaacgtgaatcacaagcccagcaacaccaaggtggacaagagtgag

SEQ ID NO: 2298 - DNA, 672 bp, synthetic construct
  misc_feature 1..672: note = Synthetic polynucleotide encoding artificial human antibody VH chain
  source 1..672: mol_type = other DNA
cccgtccagttggtgcagtctggggctgtggtgaagaagcctgggtcctcggtgaaagtctcctgcaaagcttctggaggcaccttcagcggctatggcatcaattgggtgcgacaggcccctggacaagggcttgagtggatgggaaggatcatccctattgttggagaagcaaactacgcacagaagttccagggcagagtcacaattaacgcggacaagtccacgagcacagccacattggaagtgaggagcctgagatctgaggacacggccgtctattactgtgtgagagatcgcaacattgtatctgtgccaggtgctatcccctacggaatggacgtctggggccaggggaccacggtcaccgtctcctcagcttccaccaagggcccatcggtcttccccctggcgccctgctccaggagcacctctgggggcacagcggccctgggctgcctggtcaaggactacttccccgaaccggtgacggtgtcgtggaactcaggcgccctgaccagcggcgtgcacaccttcccggctgtcctacagtcctcaggactctactccctcagcagcgtggtgaccgtgccctccagcagcttgggcacccagacctacacctgcaacgtgaatcacaagcccagcaacaccaaggtggacaagagagtt

SEQ ID NO: 2299 - DNA, 349 bp, synthetic construct
  misc_feature 1..349: note = Synthetic polynucleotide encoding artificial human antibody VH chain
  source 1..349: mol_type = other DNA
gtggtgcagctggtggagtccgggggaggcttagttcagcctggggggtccctgagactctcctgtgcagcctctggattcaccttcagtagctactggatgcactgggtccgccaagctccagggaaggggctggtgtgggtctcacgtattaatagtgatgggagtagcacaagctacgcggactccgtgaagggccgattcaccatctccagagacaacgccaagaacacgctgtatctgcaaatgaacagtctgagagccgaggacacggctgtgtattactgtgcaagagggagtgacacccttgactactggggccagggaaccctggtcaccgtctcctcag

SEQ ID NO: 2300 - DNA, 656 bp, synthetic construct
  misc_feature 1..656: note = Synthetic polynucleotide encoding artificial human antibody VH chain
  source 1..656: mol_type = other DNA
cccaggtgcagctgcaggagtcgggcccaggactgctgaagccttcacagaccctgtccctcagctgcactgtctctggtggctccatcagcagtggagattactactggagttggatccgccagcccccagggaagggcctggaatggattgggtacatctattacaatgggagcacctactacagttcgtccctcaggagtcgacttaccatatcagtggacacgtccaagaaccagttctccctgaagctgagctctgtgactgccgcagacacggccgcgtattactgtgccagagtggggctaacttttgccttgttcgacccctggggccagggaaccctggtcaccgtctcctcagcctccaccaagggcccatcggtcttccccctggcgccctgctccaggagcacctccgagagcacagcggccctgggctgcctggtcaaggactacttccccgaaccggtgacggtgtcgtggaactcaggcgccctgaccagcggcgtgcacaccttcccggctgtcctacagtcctcaggactctactccctcagcagcgtggtgaccgtgccctccagcagcttgggcacgaagacctacacctgcaatgtagatcacaagcccagcaacaccaaggtggacaagagagtt

SEQ ID NO: 2301 - DNA, 666 bp, synthetic construct
  misc_feature 1..666: note = Synthetic polynucleotide encoding artificial human antibody VH chain
  source 1..666: mol_type = other DNA
gtggtgcagctgttggagtctgggggaggcttggtacagcctggggggtccctgagactctcctgtgcagcctctggattcacctttagcagctatgccataaactgggtccgccaggctccagggaaggggctggagtgggtctcagctattagtggtagtggtggtagcacatactacgcagactccgtgaagggccggttcaccatctccagagacaattccaagaacacgctgtatctgcaaatgaacagcctgagagccgaggacacggccgtatattactgtgcgaacagtgcggggatacagctatggtcctcagacaactggttcgacccctggggccagggaaccctggtcaccgtctcctcagcctccaccaagggcccatcggtcttccccctggcaccctcctccaagagcacctctgggggcacagcggccctgggctgcctggtcaaggactacttccccgaaccggtgacggtgtcgtggaactcaggcgccctgaccagcggcgtgcacaccttcccggctgtcctacagtcctcaggactctactccctcagcagcgtggtgaccgtgccctccagcagcttgggcacccagacctacatctgcaacgtgaatcacaagcccagcaacaccaaggtggacaagagtgag

SEQ ID NO: 2302 - DNA, 657 bp, synthetic construct
  misc_feature 1..657: note = Synthetic polynucleotide encoding artificial human antibody VH chain
  source 1..657: mol_type = other DNA
gaggtgcagctgttggagtctgggggaggcttggtgcagcctggggggtccctgagactctcctgtgcagcctctggattcacctttagcagctatgccatgagctgggtccgccaggctccagggaaggggctggagtgggtctcagccattagtgccagtggtcgtaccacatactacgcagactctttcaagggccggttcaccatctccagagacaattccaagaacacgctatatttgcaaatgagcagactgagaggcgacgacgcggccgtttattactgtgcgaaagagggcatagaactcatgatcctctggggccagggaaccctggtcaccgtctcctcaacatccccgaccagccccaaggtcttcccgctgagcctctgcagcacccagccagatgggaacgtggtcatcgcctgcctggtccagggcttcttcccccaggagccactcagtgtgacctggagcgaaagcggacagggcgtgaccgccagaaacttcccacccagccaggatgcctccggggacctgtacaccacgagcagccagctgaccctgccggccacacagtgcctagccggcaagtccgtgacatgccacgtgaagcactacacgaatcccagccaggatgtgactgtgccctgcccg

SEQ ID NO: 2303 - DNA, 669 bp, synthetic construct
  misc_feature 1..669: note = Synthetic polynucleotide encoding artificial human antibody VH chain
  source 1..669: mol_type = other DNA
gtggtccagttggtggagtctgggggagccttggtccagcctggggggtccctgagactctcctgtgcagcctctggattcaccttgagcagctatgctatgtactgggtccgccaggctccagggaagggacttgaatatgtttcagctattactgctaatgggggtagcacatattatgcaaattctgtgaagggcagattcaccgtctccagagacaattccaagaaaacggtttatcttcaattgggcagcctgagagctgaggacacggctgtctattactgtgcgagaggcattaccctgactcggggagtctcctttgactactggggccagggaaccctggtcaccgtctccccagcatccccgaccagccccaaggtcttcccgctgagcctctgcagcacccagccagatgggaacgtggtcatcgcctgcctggtccagggcttcttcccccaggagccactcagtgtgacctggagcgaaagcggacagggcgtgaccgccagaaacttcccacccagccaggatgcctccggggacctgtacaccacgagcagccagctgaccctgccggccacacagtgcctagccggcaagtccgtgacatgccacgtgaagcactacacgaatcccagccaggatgtgactgtgccctgcccg

SEQ ID NO: 2304 - DNA, 352 bp, synthetic construct
  misc_feature 1..352: note = Synthetic polynucleotide encoding artificial human antibody VH chain
  source 1..352: mol_type = other DNA
cccctgcagctgcaggagtccggctcaggactggtgaagccttcacagaccctgtccctcacctgcgctgtttcaggtggctccatcagcagtggtggttactcctggagctggatccggcagccaccagggaagggcctggagtggcttgggtacatctatcatagggggacctcctactacaacccgtccctcaagagtcgagtcaccatatcactagacatgtccaagaaccagctctccctgaagctgacctctgtgaccgccgcggacacggccgtgtattactgtgccagagatgggggagcttttgatatctggggccaagggacattggtcaccgtctcttcag

SEQ ID NO: 2305 - DNA, 663 bp, synthetic construct
  misc_feature 1..663: note = Synthetic polynucleotide encoding artificial human antibody VH chain
  source 1..663: mol_type = other DNA
caggtgcacctggtggagtctgggggaggcgtggtccagcctgggaggtccctgagactctcctgtgcagcctctggattcaccttcagtaactctgctatgcactgggtccgccaggctccaggcaaggggctggattgggtgtcagttatctcatttgatggaagcaatcaatattatgcagactccgtgaagggccgattcaccatctccagagacaattccaagaacacgctgtttctgcaaatgaacagcctgagagctgaggacacggctgtatattactgtgcgagagatcggcttttcacagctattaacagtgggtactttgactactggggccagggaaccctggtcaccgtctcctcagcctccaccaagggcccatcggtcttccccctggcaccctcctccaagagcacctctgggggcacagcggccctgggctgcctggtcaaggactacttccccgaaccggtgacggtgtcgtggaactcaggcgccctgaccagcggcgtgcacaccttcccggctgtcctacagtcctcaggactctactccctcagcagcgtggtgaccgtgccctccagcagcttgggcacccagacctacatctgcaacgtgaatcacaagcccagcaacaccaaggtggacaagagtgag

SEQ ID NO: 2306 - DNA, 355 bp, synthetic construct
  misc_feature 1..355: note = Synthetic polynucleotide encoding artificial human antibody VH chain
  source 1..355: mol_type = other DNA
caggtgcagctggtgcagcctgggggtgaggtgaagaagcctggggcctcagtgaagatttcctgcaaggcatctggatacaccttcaccagtcactatatgcactgggtacgacaggcccctggacaagggctagagtggatgggaatgatcgaccctagtggcggcagcagaacctacgcacagaagttccagggcagagtcaccatgaccagggacacgtccacgagcacagtctacatggagctgagcagcctgagatctgacgacacggccgtttattactgtgcgagagaggggagctactacgggattggctactggggccagggaaccctggtcaccgtctcctcag

SEQ ID NO: 2307 - DNA, 364 bp, synthetic construct
  misc_feature 1..364: note = Synthetic polynucleotide encoding artificial human antibody VH chain
  source 1..364: mol_type = other DNA
gaggtgcaattggtggagtctgggggagtcgtggtgcagcctggggggtccctgagactctcctgtgcagcctctggattcaccttcagcgcctactggatgcactgggtccgccaagctccagggaaggggctggtgtgggtctcacgtattaatactgatgggagtagcacaagctacgcggactccgtgaagggccgattcaccatctccagagacaacgccaagaactcactgtatctgcaaatgaacagcctgagagccgaggacacggccgtgtattactgtgcgagagatacggacagtggctggttggattcgtttgactactggggccagggaaccctggtcaccgtctcctcag

SEQ ID NO: 2308 - DNA, 385 bp, synthetic construct
  misc_feature 1..385: note = Synthetic polynucleotide encoding artificial human antibody VH chain
  source 1..385: mol_type = other DNA
cagggccaactggttcagtctggggctgaggtgaagaaggctggggcctcagtgaaggtctcctgcaaggtttccggatactccctcactgaaatctccatgcactgggtgcgacaggctcctggaaaagggcttgagtgggtgggaggttttgatcctgaaggtggtgaaacaatctacgcacagaagttccagggcagagtctccatgacctgggacacgtctatagaccttgcctacatggagctgagaagtctgagttctgacgacacggccctgtattactgtgcgacagatcaggggtgtgatgatggcagctgctatgtaggccactactacggaatggacgtctggggccaagggaccaaggtcaccgtctcttcag

SEQ ID NO: 2309 - DNA, 648 bp, synthetic construct
  misc_feature 1..648: note = Synthetic polynucleotide encoding artificial human antibody VH chain
  source 1..648: mol_type = other DNA
cccctgcagctgcaggagtcgggcccaggactggtgaagccttcggagaccctgtccctcacctgcagtgtctctggtggctccatcaggagcagtgctcccttctggggctggatccgccagcccccagggaaggggctggagtggattggaaacatctattataatggagacacctcctacagcccgtccctcgagaatcgagtcaccttattcgtagacacgtccaagaaccagttctccctcaacctgacctctgtgaccgccgcggacacggccgtatattactgtgggaggattatgactccctcgattgacctctggggccagggaaagttggtcaccgtctcctcagcatccccgaccagccccaaggtcttccccctggcaccctcctccaagagcacctctgggggcacagcggccctgggctgcctggtcaaggactacttccccgaaccggtgacggtgtcgtggaactcaggcgccctgaccagcggcgtgcacaccttcccggctgtcctacagtcctcaggactctactccctcagcagcgtggtgaccgtgccctccagcagcttgggcacccagacctacatctgcaacgtgaatcacaagcccagcaacaccaaggtggacaagaatgag

SEQ ID NO: 2310 - DNA, 656 bp, synthetic construct
  misc_feature 1..656: note = Synthetic polynucleotide encoding artificial human antibody VH chain
  source 1..656: mol_type = other DNA
cccaggttcagctggtgcagtctggagctgaggtgaagaagcctggggcctcagtgaaggtctcctgcaaggcttctggttacatctttaccacctatgttatcagctgggtgcgacaggcccctggacaagggcttgagtggatgggatggatcagcgcttacactggtaacacaaactatccacagaaattccagggcagagtcaccatgaccacagacacagccacgagcacagcctacatggagctgaagagcctgagatctgacgacacggccgtgtattactgtgcgagagaaggacgggggggaggagacttctttgactactggggccagggaaccctggtcaccgtctcctcagcctccaccaagggcccatcggtcttccccctggcaccctcctccaagagcacctctgggggcacagcggccctgggctgcctggtcaaggactacttccccgaaccggtgacggtgtcgtggaactcaggcgccctgaccagcggcgtgcacaccttcccggctgtcctacagtcctcaggactctactccctcagcagcgtggtgaccgtgccctccagcagcttgggcacccagacctacatctgcaacgtgaatcacaagcccagcaacaccaaggtggacaagaatgtg

SEQ ID NO: 2311 - DNA, 660 bp, synthetic construct
  misc_feature 1..660: note = Synthetic polynucleotide encoding artificial human antibody VH chain
  source 1..660: mol_type = other DNA
taagtgcagctggtggagtctgggggaggcttggtacagcctggcaggtccctgagactctcctgtgcagcctctggattcacgtttgatgattatgccatgcactgggtccggcaagctccagggaagggcctggagtgggtctcaggtattatttggaatagtggtacgacaggctatgcggactctgtgaagggccgattcaccatctccagagacaacgccaagaaatccctgtatctgcaaatgaacagtctgagaactgaggacacggccctgtattactgtgcaaaagatggggacagtttgggggatttctctacttttgatatctggggccatgggaccatggtcaccgtctcctcagcctccaccaagggcccatcggtcttccccctggcaccctcctccaagagcacctctgggggcacagcggccctgggctgcctggtcaaggactacttccccgaaccggtgacggtgtcgtggaactcaggcgccctgaccagcggcgtgcacaccttcccggctgtcctacagtcctcaggactctactccctcagcagcgtggtgaccgtgccctccagcagcttgggcacccagacctacatctgcaacgtgaatcacaagcccagcaacaccaaggtggacaagaatgtg

SEQ ID NO: 2312 - DNA, 653 bp, synthetic construct
  misc_feature 1..653: note = Synthetic polynucleotide encoding artificial human antibody VH chain
  source 1..653: mol_type = other DNA
gcgaggtgcagttggtggagtccgggggaggcttagttcagacgggggggtccctgagactctcctgttcagcctctggattcaccttcaataattactggatgcactgggtccgccaagctccgggaaaggggctgctgtggctctcgcgaataaatactgatggtagtcgaggacactacgacgactccgtgcagggccgatttaccatctccagagacaacgccaagcaaacggtctatctgcaaatggacgggctgagagccgaggacacggctgtctatttttgtgcaagagacggctatgactttcgggcttttgaccactggggccagggagtcctggtcaccgtctcctcagcctccaccaagggcccatcggtcttccccctggcaccctcctccaagagcacctctgggggcacagcggccctgggctgcctggtcaaggactacttccccgaaccggtgacggtgtcgtggaactcaggcgccctgaccagcggcgtgcacaccttcccggctgtcctacagtcctcaggactctactccctcagcagcgtggtgaccgtgccctccagcagcttgggcacccagacctacatctgcaacgtgaatcacaagcccagcaacaccaaggtggacaagaaggtg

SEQ ID NO: 2313 - DNA, 674 bp, synthetic construct
  misc_feature 1..674: note = Synthetic polynucleotide encoding artificial human antibody VH chain
  source 1..674: mol_type = other DNA
cccaggtgcagctgctggagtcgggcccaggagtggtgaagccttcggagaccctgtctctcacctgctctgtctccggtgactccgtcagtagtttctactggacgtggatccggcaacccccagggaagggaccggagtggattggtaatatttatcacagtggcagcaccaacttcaatccctccctcaagagtcgagtcaccatatcactcgacatgtccaagaaccagttctccctgcacctaaagtctgtgaccgctgcggacactgccgtctattactgtgcgcgagctcgcggtgggggtttttgtagtaatatggactgcccggcaatgtttgactactggggccggggaaccctggtcaccgtctccgcagcctccaccaagggcccatcggtcttccccctggcaccctcctccaagagcacctctgggggcacagcggccctgggctgcctggtcaaggactacttccccgaaccggtgacggtgtcgtggaactcaggcgccctgaccagcggcgtgcacaccttcccggctgtcctacagtcctcaggactctactccctcagcagcgtggtgaccgtgccctccagcagcttgggcacccagacctacatctgcaacgtgaatcacaagcccagcaacaccaaggtggacaagagtgag

SEQ ID NO: 2314 - DNA, 364 bp, synthetic construct
  misc_feature 1..364: note = Synthetic polynucleotide encoding artificial human antibody VH chain
  source 1..364: mol_type = other DNA
gaggtgcagttggtggagtccgggggaggctcggtaaagcctggggggtcccttagactctcctgtgtagccggtggatataattttaatgatgatcggatgagctcgatgaactgggtccgccaggctccagggaaggggctggagtgggttggccgtattaaaagtaaaagtgatggtgggtcaacaaactacgctgcacccgtgcaaggcagattcaccatctcaagagatgattcgaaaaacactctgtatctccaaatgaacagcctgaaaatcgaggacacagccgtgtattattgtaccacgattcatgactacggtgaccactggggccagggaaccctggtcaccgtctcctcag

SEQ ID NO: 2315 - DNA, 642 bp, synthetic construct
  misc_feature 1..642: note = Synthetic polynucleotide encoding artificial human antibody VH chain
  source 1..642: mol_type = other DNA
gaggtgcaactggtggagtctgggggagccttggtccagcctggggggtccctgagaatttcctgtgcagcctctggattcaccgtcagtaccaactacatgagctgggtccgccaggctccagggaaggaactggagtggatctcagttatttatagcggtggtaccacatactacgcagcccccgtgaagggcagattcaccatctccagagacgattccaagaacacactgtatcttcaaatgaacagtctgagagtcgaggacacggctgtatatcactgtgcgaggggccttttacgatccctggacgtctggggccaagggaccacggtcaccgtctcctcagcctccaccaagggcccatcggtcttccccctggcgccctgctccaggagcacctccgagagcacagcggccctgggctgcctggtcaaggactacttccccgaaccggtgacggtgtcgtggaactcaggcgctctgaccagcggcgtgcacaccttcccggctgtcctacagtcctcaggactctactccctcagcagcgtggtgaccgtgacctccagcaacttcggcacccagacctacacctgcaacgtagatcacaagcccagcaacaccaaggtggacaagacagtg

SEQ ID NO: 2316 - DNA, 677 bp, synthetic construct
  misc_feature 1..677: note = Synthetic polynucleotide encoding artificial human antibody VH chain
  source 1..677: mol_type = other DNA
gtgaggtgcacctggtggagtctgggggaggcttcgtccagcctggagggtccctgagactctcctgtgcagcctctggattcacgttcagtgaccactacatggactgggtccgccaggctccagggaaggggctggagtgggttggccgtattaaaaacagagctaacagttacaacacagagtacgccgcgtctgtgagaggcagattcaccatctcaagagatgattcaaacaactcactgtttctgcaaatgaacagcctgacagccgaggacacggccgtatattactgtgctagagtgaaactgggggcatcgagccgtgtttttgatgtctggggccaagggacaatggtcaccgtctcttcagcatccccgaccagccccaaggtcttcccgctgagcctctgcagcacccagccagatgggaacgtggtcatcgcctgcctggtccagggcttcttcccccaggagccactcagtgtgacctggagcgaaagcggacagggcgtgaccgccagaaacttcccacccagccaggatgcctccggggacctgtacaccacgagcagccagctgaccctgccggccacacagtgcctagccggcaagtccgtgacatgccacgtgaagcactacacgaatcccagccaggatgtgactgtgccctgccca

SEQ ID NO: 2317 - DNA, 361 bp, synthetic construct
  misc_feature 1..361: note = Synthetic polynucleotide encoding artificial human antibody VH chain
  source 1..361: mol_type = other DNA
caggtccagctggtggagtctgggggaggcgtggtccagcctgggaggtccctgagactctcctgtgcagcctctggattcaccttccgtgattatggcatgcactgggtccgccaggccccaggccaggggctacagtgggtggcagttatatcttttgatggaagtgataaattctatgcagactccgtgaagggccggttcagcatctccagagacaattccagggacacggtgtatctgcaaatgaaccgcctaagacctgaagacacggctgtatattactgtgcgacaaccgttacacctaaggtgaccagttttgcttcctggggccagggaagcctggtcaccgtctccgcat

SEQ ID NO: 2318 - DNA, 664 bp, synthetic construct
  misc_feature 1..664: note = Synthetic polynucleotide encoding artificial human antibody VH chain
  source 1..664: mol_type = other DNA
gtgtgaggtgcagctggtggagtcggggggaggcctggtcaagcccggggggtccctcagactctcctgtgcagcctctggattcgacatcaggagttataccatacactgggtccgccaggctccagggaaggggctggagtgggtctcatccattactgctggtggaagtttcataaactacgcagactcggtaaagggccgattcaccatctccagagacaacgcccagaactcactttttctgcaagtggaccgcctgagagccgaggacacggctctttatttttgtgcgagagaacagagccccctttatttcggtccatctttggacgtctggggccaagggacctcggtcatcgtctccttagcctccaccaagggcccatcggtcttccccctggcaccctcctccaagagcacctctgggggcacagcggccctgggctgcctggtcaaggactacttccccgaaccggtgacggtgtcgtggaactcaggcgccctgaccagcggcgtgcacaccttcccggctgtcctacagtcctcaggactctactccctcagcagcgtggtgaccgtgccctccagcagcttgggcacccagacctacatctgcaacgtgaatcacaagcccagcaacaccaaggtggacaagagtgag

SEQ ID NO: 2319 - DNA, 651 bp, synthetic construct
  misc_feature 1..651: note = Synthetic polynucleotide encoding artificial human antibody VH chain
  source 1..651: mol_type = other DNA
caggtgcagctggtgcagtctggggctgaggtgaagaaccctggggcctcagtgaaggtctcctgcaaggcttctggatacaccttcaccgactactatatccactgggtgcgacaggcccctggacaagggcttgagtggatgggatggatcaaccctaatagtggtggcacaaatcatgcacagaagtttcagggcagggtcaccatgaccagggacatgtccatcaacacagcctacatggaggtgagcgggctgagatctgacgacacggccatctattactgtgcgagagagccttactcctcctacgctatggacgtctggggccaagggaccacggtcaccgtctcctcagcctccaccaagggcccatcggtcttccccctggcaccctcctccaagagcacctctgggggcacagcagccctgggctgcctggtcaaggactacttccccgaaccggtgacggtgtcgtggaactcaggcgccctgaccagcggcgtgcacaccttcccggctgtcctacagtcctcaggactctactccctcagcagcgtggtgaccgtgccctccagcagcttgggcacccagacctacatctgcaacgtgaatcacaagcccagcaacaccaaggtggacaagaaggtg

SEQ ID NO: 2320 - DNA, 655 bp, synthetic construct
  misc_feature 1..655: note = Synthetic polynucleotide encoding artificial human antibody VH chain
  source 1..655: mol_type = other DNA
gtgtgaggtgcagctgttggagtcggggggaggcttggtacagcctggggggtccctgagactctcctgtgcagcctctggattcacctttagcaactatgccatgagttgggtccgccaggctccagggaaggggctgaagtgggtctcaagtattagttatagtggtggtagcacatactacgcagactccgtgaagggccgggtcaccatctccagagacaattccaagaacacgctgtatctgcaaatgaacagcctgagagccgaggacacggccgtatattactgtgcgaaagatggatccgagatgttattgtgtgactactggggccagggaaccctggtcaccgtctcctcagcctccaccaagggcccatcggtcttccccctggcaccctcctccaagagcacctctgggggcacagcggccctgggctgcctggtcaaggactacttccccgaaccggtgacggtgtcgtggaactcaggcgccctgaccagcggcgtgcacaccttcccggctgtcctacagtcctcaggactctactccctcagcagcgtggtgaccgtgccctccagcagcttgggcacccagacctacatctgcaacgtgaatcacaagcccagcaacaccaaggtggacaagatagtg

SEQ ID NO: 2321 - DNA, 653 bp, synthetic construct
  misc_feature 1..653: note = Synthetic polynucleotide encoding artificial human antibody VH chain
  source 1..653: mol_type = other DNA
agtgtgatgtgcatctggtgcagtctgggggaggcctggtcaagccgggggggtccctgagactctcctgtgcagcctctggattcaacttcaattcttatacaatgacctgggtccgccaggctccagggaaggggctgcagtgggtctcatccattagtagtagtggtggtgacatcaactacgctgactcactgaagggccggttctccatctccagagacaacgccaagaactcagtctttttgcaactgaacagcctgagagccgaggacacggctgtctattactgtgcgagagacactaggtggcgagggttggacagctggggccagggaatcctggtcaccgtctcctcagcctccaccaagggcccatcggtcttccccctggcgccctgctccaggagcacctccgagagcacagcggccctgggctgcctggtcaaggactacttccccgaaccggtgacggtgtcgtggaactcaggcgctctgaccagcggcgtgcacaccttcccggctgtcctacagtcctcaggactctactccctcagcagcgtggtgaccgtgacctccagcaacttcggcacccagacctacacctgcaacgtagatcacaagcccagcaacaccaaggtggacaagacagtg

SEQ ID NO: 2322 - DNA, 666 bp, synthetic construct
  misc_feature 1..666: note = Synthetic polynucleotide encoding artificial human antibody VH chain
  source 1..666: mol_type = other DNA
ggagtgcagctggtggagtctgggggagacttggtacagcccggcaggtccctgagactctcctgtgcagcctctggattcacatttgatgattatgccatgcactgggtccggcaatctccagggaagggcctggagtgggtctcaagtattagttggaatagtggtgacatagcatatggggactctgtgaaggggcgattcaccgtctccagagacaacgccaagaactccctgcatctgcaactgaacagtctgagagttgaggactcggccctctattactgtgcaaaagatctgttagcagtgcctggcctacttgacgactggggccagggaaccctggtcaccgtctccacagcatccccgaccagccccaaggtcttcccgctgagcctctgcagcacccagccagatgggaacgtggtcatcgcctgcctggtccagggcttcttcccccaggagccactcagtgtgacctggagcgaaagcggacagggcgtgaccgccagaaacttcccacccagccaggatgcctccggggacctgtacaccacgagcagccagctgaccctgccggccacacagtgcctagccggcaagtccgtgacatgccacgtgaagcactacacgaatcccagccaggatgtgactgtgccctgccca

SEQ ID NO: 2323 - DNA, 639 bp, synthetic construct
  misc_feature 1..639: note = Synthetic polynucleotide encoding artificial human antibody VH chain
  source 1..639: mol_type = other DNA
caggtgctactggtgcagtctggggctgaggtgaagaagcctgggtcctcggtgaaggtctcctgcaaggcttctggaggcaccttcagcagctatggtatcagctgggtgcgacaggcccctggacaagggcttgagtggatgggagggatggcaaactacgcacagaagttccagggcagagtcacgattagcggggacgaatcaacgagcacagcctacatggagctgagcaacctgacatctgaggacacggccgtgtattactgtgcgagtcggggtggatcttctcgccggtacggtatgggcgtctggggccaagggaccacggtcaccgtctcctcagcctccaccaagggcccatcggtcttccccctggcaccctcctccaagagcacctctgggggcacagcggccctgggctgcctggtcaaggactacttccccgaaccggtgacggtgtcgtggaactcaggcgccctgaccagcggcgtgcacaccttcccggctgtcctacagtcctcaggactctactccctcagcagcgtggtgaccgtgccctccagcagcttgggcacccagacctacatctgcaacgtgaatcacaagcccagcaacaccaaggtggacaagagagtg

SEQ ID NO: 2324 - DNA, 667 bp, synthetic construct
  misc_feature 1..667: note = Synthetic polynucleotide encoding artificial human antibody VH chain
  source 1..667: mol_type = other DNA
gtgtgaggtgcagttgttggagtctgggggagccttggtacagccgggggggtccctgagactctcctgtgcagtctctggattaacctttaacagatttgccatgacctgggtccgccaggctccagggaaggggctggagtgggtctcacacattggtggtagtggtggttacacatactacgcagactccgtgaagggccggttcaccatctctagagacaattccaagaacacgttgtatctgcaaatgaacagcctgcgagccgaggacacggccgtatatcactgtgtgaaattgaagggcattggcgctatgtggacgtacgctatggacgtctggggccaagggaccacggtcaccgtctcctcagcctccaccaagggcccatcggtcttccccctggcgccctgctccaggagcacctccgagagcacagcggccctgggctgcctggtcaaggactacttccccgaaccggtgacggtgtcgtggaactcaggcgctctgaccagcggcgtgcacaccttcccggctgtcctacagtcctcaggactctactccctcagcagcgtggtgaccgtgacctccagcaacttcggcacccagacctacacctgcaacgtagatcacaagcccagcaacaccaaggtggacaagacagtg

SEQ ID NO: 2325 - DNA, 681 bp, synthetic construct
  misc_feature 1..681: note = Synthetic polynucleotide encoding artificial human antibody VH chain
  source 1..681: mol_type = other DNA
cagctgcagctgcaggagtcgggcccaggactggtgaagccttcggacaccctgtccctcacctgcactgtctcgggctactccattagcactgcttactactggggctggatccgacagcccccagggaagggactggaatggattgggagtatctttcacagtgggagcgcctactacaatccgtccctcgacggtcgagtcagcctttcagtggacacgtccaagaaccagttctccctgaggctgaagtctgttaccgccgcagacacggccgtttattactgtgcgagagatcagggctacggtgattacgactatcccagagactggatcgaaccctggggccaaggaaccctggtcaccgtctcttcagcatccccgaccagccccaaggtcttcccgctgagcctcgacagcaccccccaagatgggaacgtggtcgtcgcatgcctggtccagggcttcttcccccaggagccactcagtgtgacctggagcgaaagcggacagaacgtgaccgccagaaacttcccacctagccaggatgcctccggggacctgtacaccacgagcagccagctgaccctgccggccacacagtgcccagacggcaagtccgtgacatgccacgtgaagcactacacgaatcccagccaggatgtgactgtgccctgccca

SEQ ID NO: 2326 - DNA, 370 bp, synthetic construct
  misc_feature 1..370: note = Synthetic polynucleotide encoding artificial human antibody VH chain
  source 1..370: mol_type = other DNA
caggtgcagctggtgcagtctggggctgaggtgaagaagcctgggtcctcggtgaaggtctcctgcaaggcttctggaggcaacgtcagaagttatagcatcagctgggtgcgacaggcccccggacaagggcttgagtggatgggagggatgatcaccacttttggaaaagcggactacgcactgaagttccgtgacagagtcacaataaccgcggacagatccacgaacacagtctacatggaactgagcagcctcacatcacaggacacggccgtctattactgtgcgagcgtccgagacctcgtcagtggcaccacttactactatcactactggggccagggaaccctgatctccgtctcctcag

SEQ ID NO: 2327 - DNA, 644 bp, synthetic construct
  misc_feature 1..644: note = Synthetic polynucleotide encoding artificial human antibody VH chain
  source 1..644: mol_type = other DNA
cccaggtgcagctgcaggagtcgggcccaggactggtgaagccttcggagaccctgtccctcacctgcactgtctctggtgactccatcagtagtaactactggagctggatccggcagcccccagggaagggactggagtggattgggtatatctattacagtgggagcaccaactacaacccctccctcaagagtcgagtcaccatatcagtagacacgtccaagaaccagttctccgtgaagctgagctctgtgaccgctgcggacacggccgtgtattactgtgcgagatacggtgactactcctttgacccctggggccagggaaccctggtcaccgtctcctcagcctccaccaagggcccatcggtcttccccctggcaccctcctccaagagcacctctgggggcacagcggccctgggctgcctggtcaaggactacttccccgaaccggtgacggtgtcgtggaactcaggcgccctgaccagcggcgtgcacaccttcccggctgtcctacagtcctcaggactctactccctcagcagcgtggtgaccgtgccctccagcagcttgggcacccagacctacatctgcaacgtgaatcacaagcccagcaacaccaaggtggacaagagtgag

SEQ ID NO: 2328 - DNA, 656 bp, synthetic construct
  misc_feature 1..656: note = Synthetic polynucleotide encoding artificial human antibody VH chain
  source 1..656: mol_type = other DNA
cccaggttcagttggtgcagtctggagctgaggtgaagaagcctggggcctcagtgaaggtctcctgcaaggcttttggttacaggttttccaactttgggatcagttgggtgcgacaggcccctggacaagggcttgagtggatgggatggatcagcgcttacaatgggaacacaaactatgcacagaagctccagggcagagtcaccatgaccacagacacatccacgagcacagcctacatggagctgaggagcctgagatctgacgacacggccgtgtattactgtgcgagagtcgtagacacagttttggcagactttgactactggggccagggaaccctggtcaccgtctcctcagcctccaccaagggcccatcggtcttccccctggcaccctcctccaagagcacctctgggggcacagcggccctgggctgcctggtcaaggactacttccccgaaccggtgacggtgtcgtggaactcaggcgccctgaccagcggcgtgcacaccttcccggctgtcctacagtcctcaggactctactccctcagcagcgtggtgaccgtgccctccagcagcttgggcacccagacctacatctgcaacgtgaatcacaagcccagcaacaccaaggtggacaagagtgag

SEQ ID NO: 2329 - DNA, 657 bp, synthetic construct
  misc_feature 1..657: note = Synthetic polynucleotide encoding artificial human antibody VH chain
  source 1..657: mol_type = other DNA
caggtgcacctggtgcaatctgggtctgaatttaagaagcctggggcctcagtgaagatttcctgcaagacttctggatacacgttcactaattatgctatgaattgggtgcggcaggcccctggacaaggacttgaatgggtgggatggatcaacaccgtcactgggatcccaggttatgcccagggcttcacaggacgctttatcatctccttggacacctctggccgcacgtcttatctgcagatcaacagcctacaggctgaggacactgccgtatattactgtgcgcgatcagggggctttggctggtcaagggaccttgactactggggccagggaaccctggtcaccgtctcctctgcctccaccaagggcccatcggtcttccccctggcgccctgctccaggagcacctctgggggcacagcggccctgggctgcctggtcaaggactacttccccgaaccggtgacggtgtcgtggaactcaggcgccctgaccagcggcgtgcacaccttcccggctgtcctacagtcctcaggactctactccctcagcagcgtggtgaccgtgccctccagcagcttgggcacccagacctacacctgcaacgtgaatcacaagcccagcaacaccaaggtggacaagagagtt

SEQ ID NO: 2330 - DNA, 669 bp, synthetic construct
  misc_feature 1..669: note = Synthetic polynucleotide encoding artificial human antibody VH chain
  source 1..669: mol_type = other DNA
ccgcagctgcagctgcaggagtcgggcccaggactggtgaagccttcggagaccctgtccctcacctgcagtgtctctggtgactccatcagcagcagtagctacttctggggctggatccgccagccccccgggaaggggctggagtggattgggagtgtctattatagtgggagcacctactacaagccgtccctcaagagtcgactcaccatatccgtagacacgtccaagaagcagttctccctgaatctgagctctatgaccgccgcagacacggctgtttattactgtgcgagacatggattttggagtggccccatacccgacgcttttgatatctggggccaagggacaatggtcaccgtctcctcagcctccaccaagggcccatcggtcttccccctggcaccctcctccaagagcacctctgggggcacagcggccctgggctgcctggtcaaggactacttccccgaaccggtgacggtgtcgtggaactcaggcgccctgaccagcggcgtgcacaccttcccggctgtcctacagtcctcaggactctactccctcagcagcgtggtgaccgtgccctccagcagcttgggcacccagacctacatctgcaacgtgaatcacaagcccagcaacaccaaggtggacaagaatgag

SEQ ID NO: 2331 - DNA, 651 bp, synthetic construct
  misc_feature 1..651: note = Synthetic polynucleotide encoding artificial human antibody VH chain
  source 1..651: mol_type = other DNA
caggtgcagctggtggagtctgggggaggcgtggtccaccctgggaggtccctgagactctcctgtgcagcctctggattcaccttcagtaactatggcatgcactggctccggcaggctccaggcaaggggctggagtgggtggcaattatagcctatgatggaagtcagaaaaagtatgcagactccgtgaagggccgattcaccatttccagagacaattccaaggacacgatgtatctgcaaatgaacaacctgagaactgaggacacggctgtgtattactgtgcgcacgaagactatggttcggggaatggtaattactggggccagggaaccctggtcaccgtctcctcagcctccaccaagggcccatcggtcttccccctggcaccctcctccaagagcacctctgggggcacagcggccctgggctgcctggtcaaggactacttccccgaaccggtgacggtgtcgtggaactcaggcgccctgaccagcggcgtgcacaccttcccggctgtcctacagtcctcaggactctactccctcagcagcgtggtgaccgtgccctccagcagcttgggcacccagacctacatctgcaacgtgaatcacaagcccagcaacaccaaggtggacaagagtgag

SEQ ID NO: 2332 - DNA, 660 bp, synthetic construct
  misc_feature 1..660: note = Synthetic polynucleotide encoding artificial human antibody VH chain
  source 1..660: mol_type = other DNA
cccgtgcacctggtgcagtctggggctgaggtgaggaagcctgggtcctcggtgaaggtctcctgcatggcctctggaggctccttcaacacctatgcagtcaactgggtgcgacaggcccccggacaggggcttgagtggatgggagggatcatccctgtttttggaacaacaaactacgcaccgaggttccagggcagagtcaccattaccgcggacgaatccacgagcacagtctacatggaactgaccagcctgacatctgaggacacggccgtgtattactgtgcgagagaccgcgacagtggctacgagaggaattgtctcgacccctggggccagggaaccctggtcaccgtctcctccgcttccaccaagggcccatccgtcttccccctggcgccctgctccaggagcacctccgagagcacagccgccctgggctgcctggtcaaggactacttccccgaaccggtgacggtgtcgtggaactcaggcgccctgaccagcggcgtgcacaccttcccggctgtcctacagtcctcaggactctactccctcagcagcgtggtgaccgtgccctccagcagcttgggcacgaagacctacacctgcaacgtagatcacaagcccagcaacaccaaggtggacaagagagtg

SEQ ID NO: 2333 - DNA, 695 bp, synthetic construct
  misc_feature 1..695: note = Synthetic polynucleotide encoding artificial human antibody VH chain
  source 1..695: mol_type = other DNA
cccaggtccaacttatgcagtctggggctgaggtgaagcagcctggggcctcagtgaaggtttcctgcaaggcttctggagacaccttcacctcttttgccatccattgggtgcgccaggtctccggacaagggcttgagtggatgggatggatcaacgctggcaatggtgacacgaaatattcacagaagatccagggcagaatcaccataaccagggacacatccgcgagaacagcctacatggagttgagcagcctgagatctgaagacacggctgtgtattattgtgcgaggggggccccttatggttcgcgaatttattatgattacgactcctaccatggtatggacgtctggggccaagggaccacggtcaccgtctcctcagcatccccgaccagccccaaggtcttcccgctgagcctctgcagcacccagccagatgggaacgtggtcatcgcctgcctggtccagggcttcttcccccaggagccactcagtgtgacctggagcgaaagcggacagggcgtgaccgccagaaacttcccacccagccaggatgcctccggggacctgtacaccacgagcagccagctgaccctgccggccacacagtgcctagccggcaagtccgtgacatgccacgtgaagcactacacgaatcccagccaggatgtgactgtgccctgcccg

SEQ ID NO: 2334 - DNA, 666 bp, synthetic construct
  misc_feature 1..666: note = Synthetic polynucleotide encoding artificial human antibody VH chain
  source 1..666: mol_type = other DNA
caggtgcacctgcaggagtcgggcccaggactggtgaagccttcacagaccctgtccctcacctgcactgtctctggtgactccatcagtaacggtgattattgctggaactggatccgccagcgcccagggaagggcctggagtggattgggtacatctatcatagtgggagcacctacgagaacccgtccctcaggagtcgagttaccatgtcagtagacacgtctaagaaccagttctccatggagttgacctctgtgactgccgcggacacggccgtgtattactgtgcgagaggaaagtttgactggttccctcgtgtgtcctcctttgactactggggccggggaaccctggtcaccgtctcctcagcctccaccaagggcccatcggtcttccccctggcaccctcctccaagagcacctctgggggcacagcggccctgggctgcctggtcaaggactacttccccgaaccggtgacggtgtcgtggaactcaggcgccctgaccagcggcgtgcacaccttcccggctgtcctacagtcctcaggactctactccctcagcagcgtggtgaccgtgccctccagcagcttgggcacccagacctacatctgcaacgtgaatcacaagcccagcaacaccaaggtggacaagagtgag

SEQ ID NO: 2335 - DNA, 666 bp, synthetic construct
  misc_feature 1..666: note = Synthetic polynucleotide encoding artificial human antibody VH chain
  source 1..666: mol_type = other DNA
gtggtgcaactggtggagtctgggggagactgggtccagcctggggggtccctgagactctcctgcgcagcctctggattcacctttagaagctattggatgagttgggtccgccaggctccagggaaggggctggagtgggtggccagtgtagagggataccgaagtgaagaatactacgtggactctgtgaagggccgattcaccatctccagagacaacgccaagaattcagtgtatctgcagatgaacagcctaagagccgaggacacggctgtttattactgtgcggccgcctattatattgatactagcggctttgactactggggccagggaacccaggtcactgtctcctcagcatccccgaccagccccaaggtcttcccgctgagcctctgcagcacccagccagatgggaacgtggtcatcgcctgcctggtccagggcttcttcccccaggagccactcagtgtgacctggagcgaaagcggacagggcgtgaccgccagaaacttcccacccagccaggatgcctccggggacctgtacaccacgagcagccagctgaccctgccggccacacagtgcctagccggcaagtccgtgacatgccacgtgaagcactacacgaatcccagccaggatgtgactgtgccctgccca

SEQ ID NO: 2336 - DNA, 673 bp, synthetic construct
  misc_feature 1..673: note = Synthetic polynucleotide encoding artificial human antibody VH chain
  source 1..673: mol_type = other DNA
gtgtgaggtgcaactgttggagtctgggggaaagttggtacagcctggggggtccctgagactctcctgtgcagcctctggattcacctacgacagttatgtcatgaactgggtccgccaggctccagggaaggggctggagtgggtctcaggtattagtgccagtggcggtggcacctactacgcagactccgtgaagggccggttcaccatctccagagacaattccaagaacacgctgtacctggaaatgaacagcctgagagccgacgacacggccgtatattactgtgcgaaaggacggacgtatagcaataactggttatttcactggtacttcgatctctggggccgtggcaccctggtcactgtctcctcagcctccaccaagggcccatcggtcttccccctggcaccctcctccaagagcacctctgggggcacagcggccctgggctgcctggtcaaggactacttccccgaaccggtgacggtgtcgtggaactcaggcgccctgaccagcggcgtgcacaccttcccggctgtcctacagtcctcaggactctactccctcagcagcgtggtgaccgtgccctccagcagcttgggcacccagacctacatctgcaacgtgaatcacaagcccagcaacaccaaggtggacaagaatgag

SEQ ID NO: 2337 - DNA, 657 bp, synthetic construct
  misc_feature 1..657: note = Synthetic polynucleotide encoding artificial human antibody VH chain
  source 1..657: mol_type = other DNA
cccgtgcagctgcaggagtcgggcccaggactggtgaagccttcggagaccctgtccctcacttgcactgtctctagtggctccgtcagcagtggtagtcactactggagctggatccggcagcccccagggaagggactggagtggattgggtatatctattacagtgggacctccaactacaacccctccctcaagggtcgagtcgccatatcagtagacacgtccaagaaccagttctccctgaagctgagctctgtgaccgctgcggacacggccatatattactgtgcgagagtttttagtacgatatttcatggggtcgacccctggggccagggaaccctggtcaccgtctcctcagcctccaccaagggcccatcggtcttccccctggcaccctcctccaagagcacctctgggggcacagcggccctgggctgcctggtcaaggactacttccccgaaccggtgacggtgtcgtggaactcaggcgccctgaccagcggcgtgcacaccttcccggctgtcctacagtcctcaggactctactccctcagcagcgtggtgaccgtgccctccagcagcttgggcacccagacctacatctgcaacgtgaatcacaagcccagcaacaccaaggtggacaagaaagtg

SEQ ID NO: 2338 - DNA, 672 bp, synthetic construct
  misc_feature 1..672: note = Synthetic polynucleotide encoding artificial human antibody VH chain
  source 1..672: mol_type = other DNA
caggtgcagctggtgcagtctggggctgaagtgaagaagcctggggcctcagtaaaggtctcctgcagggcttcaggatacagcttcaccggctattatatacactgggtgcgacaggcccctggacaagggcttgagtggatgggatggatcaaccctaaaactggtgacacacactatgcacagaactttcagggctgggtcaccatgaccagggacacgtccatcagtaccgcctacatggagttgaccattttgagatctgacgacacggccgtgtattactgtgcgagacacttaagcagtggcgaataccactacggtttggacgtctggggccaagggaccacggtcactgcctcctcagcatccccgaccagccccaaggtcttcccgctgagcctctgcagcacccagccagatgggaacgtggtcatcgcctgcctggtccagggcttcttcccccaggagccactcagtgtgacctggagcgaaagcggacagggcgtgaccgccagaaacttcccacccagccaggatgcctccggggacctgtacaccacgagcagccagctgaccctgccggccacacagtgcctagccggcaagtccgtgacatgccacgtgaagcactacacgaatcccagccaggatgtgactgtgccctgccca

SEQ ID NO: 2339 - DNA, 654 bp, synthetic construct
  misc_feature 1..654: note = Synthetic polynucleotide encoding artificial human antibody VH chain
  source 1..654: mol_type = other DNA
taggtgcagctggtggagtctgggggaggcgtggtccagcctgggaggtccctgagactctcctgtgcagcccctggattcaccttcagtaactatggcatgcactgggtccgccaggctccaggcaaggggctggagtgggtggcagttatatcatatgatggaagtaataaatactatgcagactccgtgaagggccgattcaccatctccagagacaattccaagaacacgctgtatctgcaaatgaacagcctgagagctgaggacacggctgtctattactgtgcgaaaggaaagggtatagtgggagccacctttgactactggggccagggaaccctggtcaccgtctcctcagcctccaccaagggcccatcggtcttccccctggcaccctcctccaagagcacctctgggggcacagcggccctgggctgcctggtcaaggactacttccccgaaccggtgacggtgtcgtggaactcaggcgccctgaccagcggcgtgcacaccttcccggctgtcctacagtcctcaggactctactccctcagcagcgtggtgaccgtgccctccagcagcttgggcacccagacctacatctgcaacgtgaatcacaagcccagcaacaccaaggtggacaagaatgtg

SEQ ID NO: 2340 - DNA, 673 bp, synthetic construct
  misc_feature 1..673: note = Synthetic polynucleotide encoding artificial human antibody VH chain
  source 1..673: mol_type = other DNA
gtgtgaggtgcagctggtggagtctgggggaggcctggtcaagcctggggggtccctgagactctcctgtgcagcctctggattcaccttcagtaactataacatgaactgggtccgccaggctccagggaaggggctggagtgggtctcatccattagtagtagtagtagttacatatactacgcagactcagtgaagggccgattcaccatctccagagacaacgccaagaactcactgtatctgcaaatgaacagcctgagagccgaggacacggctgtgtattactgtgcgagagatgcgctagattttgactggttattgtcagccgggggctttgactactggggccagggaaccctggtcaccgtctcctcagcctccaccaagggcccatcggtcttccccctggcaccctcctccaagagcacctctgggggcacagcggccctgggctgcctggtcaaggactacttccccgaaccggtgacggtgtcgtggaactcaggcgccctgaccagcggcgtgcacaccttcccggctgtcctacagtcctcaggactctactccctcagcagcgtggtgaccgtgccctccagcagcttgggcacccagacctacatctgcaacgtgaatcacaagcccagcaacaccaaggtggacaagaaggtg

SEQ ID NO: 2341 - DNA, 651 bp, synthetic construct
  misc_feature 1..651: note = Synthetic polynucleotide encoding artificial human antibody VH chain
  source 1..651: mol_type = other DNA
cccctgcagctgcaggagtcgggcccaggactggtgaagccttcggagaccctgtccctcacctgcactgtctctggtggctccatcagcagtagtagttactactggggctggatccgccagcccccagggaaggggctggagtggattgggagtatctattatagtgggagcacctactacaacccgtccctcaagagtcgagtcaccatatccgtagacacgtccaagaaccagttctccctgaagctgagctctgtgaccgccgcagacacggctgtgtattcctgtgcgagactacttgtggggggtgcttttgatatctggggccaagggacaatggtcaccgtctcttcagcctccaccaagggcccatcggtcttccccctggcaccctcctccaagagcacctctgggggcacagcggccctgggctgcctggtcaaggactacttccccgaaccggtgacggtgtcgtggaactcaggcgccctgaccagcggcgtgcacaccttcccggctgtcctacagtcctcaggactctactccctcagcagcgtggtgaccgtgccctccagcagcttgggcacccagacctacatctgcaacgtgaatcacaagcccagcaacaccaaggtggacaagagtgag

SEQ ID NO: 2342 - DNA, 679 bp, synthetic construct
  misc_feature 1..679: note = Synthetic polynucleotide encoding artificial human antibody VH chain
  source 1..679: mol_type = other DNA
gtgtgaggtgcagctggtggagtctgggggaggcttggtaaagcctggggggtcccttagactctcctgtgcagcctctggtttcactttcagtaacgcctggatgaactgggtccgccaggctccagggaaggggctggagtgggtcggccgtattaaaagcaaaactgatggtgggacaacagactacgctgcacccgtgaaaggcagattcaccatctcaagagatgattcaaaaaacacgctgtatctgcaaatgaacagcctgaaaaccgaggacacagccgtgtattactgtaccccaggatcttgtagtggtggtagctgctactccggcgatgcttttgatatctggggccaagggacaatggtcaccgtctcttcagcctccaccaagggcccatcggtcttccccctggcaccctcctccaagagcacctctgggggcacagcggccctgggctgcctggtcaaggactacttccccgaaccggtgacggtgtcgtggaactcaggcgccctgaccagcggcgtgcacaccttcccggctgtcctacagtcctcaggactctactccctcagcagcatggtgaccgtgccctccagcagcttgggcacccagacctacatctgcaacgtgaatcacaagcccagcaacaccaaggtggacaagagtgag

SEQ ID NO: 2343 - DNA, 660 bp, synthetic construct
  misc_feature 1..660: note = Synthetic polynucleotide encoding artificial human antibody VH chain
  source 1..660: mol_type = other DNA
caggtgcacctggtgcagtctggggctgaggtgaagaagcctggggcctcagtgaaagtttcctgtaaggcatctggatacaccttcaccaactactttatccactgggtgcgacaggcccctggacaggggcctgagtggatgggagtaatcaaccctagttttggaagcacaacctacgcacagaagttgcagggcagagtcaccatgaccagggagacgtccacgagcactgtctacatggaactgagcagcctgagatctgaggacacggccgtctattactgtgcgagagagtcccttgatagtgcctcatatagtaccatcgcacattggggccagggaaccctggtcaccgtctcttcagcctccaccaagggcccatcggtcttccccctggcaccctcctccaagagcacctctgggggcacagcggccctgggctgcctggtcaaggactacttccccgaaccggtgacggtgtcgtggaactcaggcgccctgaccagcggcgtgcacaccttcccggctgtcctacagtcctcaggactctactccctcagcagcgtggtgaccgtgccctccagcagcttgggcacccagacctacatctgcaacgtgaatcacaagcccagcaacaccaaggtggacaagagtgag

SEQ ID NO: 2344 - DNA, 660 bp, synthetic construct
  misc_feature 1..660: note = Synthetic polynucleotide encoding artificial human antibody VH chain
  source 1..660: mol_type = other DNA
caggtgcagctggtgcagtctggggctgaggtgaagaaacctgggtcctcggtgaaggtctcctgcaaggcccctggaggcaccttcaacaactatggtatcagctgggtgcgacaggcccctggacaagggcttgagtggatgggagggatcatgcctatgtttggaagaacaagcgagacacagaagttccagggcagagtcaccattagcgcggacgaatctacgagcacagtgtacatggagatgagtagcctcagatttgacgacacggccgtatattactgtgcgagagatcgaggaggcaacagctggcttgatgtttttgatatgtggggccaagggacaatggtcaccgtctcctcagcctccaccaagggcccatcggtcttccccctggcgccctgctccaggagcacctccgagagcacagcggccctgggctgcctggtcaaggactacttccccgaaccggtgacggtgtcgtggaactcaggcgccctgaccagcggcgtgcacaccttcccggctgtcctacagtcctcaggactctactccctcagcagcgtggtgaccgtgccctccagcaacttcggcacccagacctacacctgcaacgtagatcacaagcccagcaacaccaaggtggacaagacagtt

SEQ ID NO: 2345 - DNA, 672 bp, synthetic construct
  misc_feature 1..672: note = Synthetic polynucleotide encoding artificial human antibody VH chain
  source 1..672: mol_type = other DNA
gaggtacaattgctggagtctgggggaggcttggtacatcctggagggtccctgagactgtcctgtgtggcctctggattcaccttcagtagttatgagatgacctgggtccgccaggctccagggaaggggctggagtggatctcctatatcagcagtactggaaccaccacataccacgcagactctgtgaggggccgattcaccatctccagagacaacgccaagagctcactgtttttgcagatgaacagcctgcgagtcgaagacacggctctgtattactgtgcgagatcccccgccgcctttggctcagagagttactttgactcctggggtcagggagtcctggtcaccgtctcctcagcatccccgaccagccccaaggtcttcccgctgagcctctgcagcacccagccagatgggaacgtggtcatcgcctgcctggtccagggcttcttcccccaggagccactcagtgtgacctggagcgaaagcggacagggcgtgaccgccagaaacttcccacccagccaggatgcctccggggacctgtacaccacgagcagccagctgaccctgccggccacacagtgcctagccggcaagtccgtgacatgccacgtgaagcactacacgaatcccagccaggatgtgactgtgccctgccca

SEQ ID NO: 2346 - DNA, 666 bp, synthetic construct
  misc_feature 1..666: note = Synthetic polynucleotide encoding artificial human antibody VH chain
  source 1..666: mol_type = other DNA
caggtgcagttggtggaatctgggggaggcgtggtccagcctgggaggtccctgagactctcctgtgcagcctctggattcaccttcacgacctatgctgtgcactgggtccgccaggctccaggcaaggggctggagtgggtggcagttatatcaaatgacggaagtaataaaaactacgcagactccgtgaggggccgattcatcatctccagagacaattccaagaacactctgtatctccaaatgaacagcctgagagctgaggacacggctgtgtattactgtgcgaaagatcttctagaggacccatacttcggggacttattgtttgactactggggccagggaaccctggtcaccgtctcctcagcctccaccaagggcccatcggtcttccccctggcaccctcctccaagagcacctctgggggcacagcggccctgggctgcctggtcaaggactacttccccgaaccggtgacggtgtcgtggaactcaggcgccctgaccagcggcgtgcacaccttcccggctgtcctacagtcctcaggactctactccctcagcagcgtggtgaccgtgccctccagcagcttgggcacccagacctacatctgcaacgtgaatcacaagcccagcaacaccaaggtggacaagaatgtg

SEQ ID NO: 2347 - DNA, 671 bp, synthetic construct
  misc_feature 1..671: note = Synthetic polynucleotide encoding artificial human antibody VH chain
  source 1..671: mol_type = other DNA
ccgaggtgcagctggtgcagtctggagcagaggtgaaaaagtccggggagtctctgaagatctcctgtaagggttctggatacacctttaccagctactggatcgcctgggtgcgccagatgcccgggaaaggcctggagtggatggggatcatctatcctggtgactctgataccagatacagcccgtccttccaaggccaggtcaccatctcagccgacaagtccatcagcaccgcctacctgcagtggagcagcctgaaggcctcggacaccgccatgtattactgtgtgaggacccccgctgttggcaccgaccctgactactggggccagggaaccctggtcaccgtctcctcagggagtgcatccgccccaacccttttccccctcgtctcctgtgagaattccccgtcggatacgagcagcgtggccgttggctgcctcgcacaggacttccttcccgactccatcactttctcctggaaatacaagaacaactctgacatcagcagcacccggggcttcccatcagtcctgagagggggcaagtacgcagccacctcacaggtgctgctgccttccaaggacgtcatgcagggcacagacgaacacgtggtgtgcaaagtccagcaccccaacggcaacaaagaaaagaacgtgcctcttccg

SEQ ID NO: 2348 - DNA, 651 bp, synthetic construct
  misc_feature 1..651: note = Synthetic polynucleotide encoding artificial human antibody VH chain
  source 1..651: mol_type = other DNA
gaggtccagttgatggaatctgggggaggtttggtacagccgggggggtccctgagactctcctgtgcagcctctggactcaccttcagcatttatagcatgaattgggtccgccaggccccagggaaggggctggagtgggtttcatatattagtcgggggagcagtgtgatataccacgcagactctgtgaagggccgattcaccatctccagagacgacggcaagaacctactgtatctgcaaatgaacagcctgagagacgacgacacggctatgtattactgttcgagtggggggtccacatcgatggttgggagatactggggccagggatccctggtcaccgtctcctcagcctccaccaagggcccatcggtcttccccctggcaccctcctccaagagcacctctgggggcacagcggccctgggctgcctggtcaaggactacttccccgaaccggtgacggtgtcgtggaactcaggcgccctgaccagcggcgtgcacaccttcccggctgtcctacagtcctcaggactctactccctcagcagcgtggtgaccgtgccctccagcagcttgggcacccagacctacatctgcaacgtgaatcacaagcccagcaacaccaaggtggacaagagagtg

SEQ ID NO: 2349 - DNA, 662 bp, synthetic construct
  misc_feature 1..662: note = Synthetic polynucleotide encoding artificial human antibody VH chain
  source 1..662: mol_type = other DNA
cccaggtcaccttgaaggagtctggtcctgtgctggtgaaacccacagagaccctcacgctgacctgcaccgtctctgggttctcactcagcaatgctagaatgggtgtgagctggatccgtcagcccccagggaaggccctggagtggcttggacacattttttcgaatgacgaaaaatcctacagcacatctctgaagagcaggctcaccatctccaaggacacctccaaaagccaggtggtccttaccttgaccaacatggaccctgtggacacagccacatattactgtgcacggatgaccccattcaagtttggactatgccctgactactggggccagggaaccctggtcaccgtctcctcagcctccaccaagggcccatcggtcttccccctggcaccctcctccaagagcacctctgggggcacagcggccctgggctgcctggtcaaggactacttccccgaaccggtgacggtgtcgtggaactcaggcgccctgaccagcggcgtgcacaccttcccggctgtcctacagtcctcaggactctactccctcagcagcgtggtgaccgtgccctccagcagcttgggcacccagacctacatctgcaacgtgaatcacaagcccagcaacaccaaggtggacaagaaggtg

SEQ ID NO: 2350 - DNA, 659 bp, synthetic construct
  misc_feature 1..659: note = Synthetic polynucleotide encoding artificial human antibody VH chain
  source 1..659: mol_type = other DNA
cccaggtgcagctggtgcagtctggggctgaggtgaagaagcctggggcctcagtgaaggtctcctgcaaggcttctggatacaccttcaccgtctactatatgcactgggtgcgacaggcccctggacaagggcttgagtggatgggacggatcaaccctaacagtggtggcacaaactatgcacagaagtttcagggcagggtcaccatgaccagggacacgtccatcagcacagcctacatggaactgagcaggctgacatctgacgacacggccgtgtattactgtgcgagagtagtggtggtaggtacagactacggtatggacgtctggggccaagggaccacggtcaccgtctcctcagcctccaccaagggcccatcggtcttccccctggcaccctcctccaagagcacctctgggggcacagcggccctgggctgcctggtcaaggactacttccccgaaccggtgacggtgtcgtggaactcaggcgccctgaccagcggcgtgcacaccttcccggctgtcctacagtcctcaggactctactccctcagcagcgtggtgaccgtgccctccagcagcttgggcacccagacctacatctgcaacgtgaatcacaagcccagcaacaccaaggtggacaagagtgag

SEQ ID NO: 2351 - DNA, 659 bp, synthetic construct
  misc_feature 1..659: note = Synthetic polynucleotide encoding artificial human antibody VH chain
  source 1..659: mol_type = other DNA
cccaggttcagctggtgcagtctggagctgaggtgaagaagcctggggcctcagtgaaggtctcctgcaaggcttctggttacacctttaccagctatggtatcagctgggtgcgacaggcccctggacaagggcttgagtggatgggatggatcagcgcttacaatggtaacacaaactatgcacagaagctccagggcagagtcaccatgaccacagacacatccacgagcacagcctacatggagctgaggagcctgacatctgacgacacggccgtgtattactgtgcgagagatcaaggactggagagggctaactggttcgacccctggggccagggaaccctggtcaccgtctcctcagcctccaccaagggcccatcggtcttccccctggcaccctcctccaagagcacctctgggggcacagcggccctgggctgcctggtcaaggactacttccccgaaccggtgacggtgtcgtggaactcaggcgccctgaccagcggcgtgcacaccttcccggctgtcctacagtcctcaggactctactccctcagcagcgtggtgaccgtgccctccagcagcttgggcacccagacctacatctgcaacgtgaatcacaagcccagcaacaccaaggtggacaagaaagtg

SEQ ID NO: 2352 - DNA, 651 bp, synthetic construct
  misc_feature 1..651: note = Synthetic polynucleotide encoding artificial human antibody VH chain
  source 1..651: mol_type = other DNA
caggtacacctgcaggagtcaggtccaggactggtgaagccctcgcggaccctctcactcacctgtgccatctccggggacagtgtctctagcaccagtgctgcttggaactggatcaggcagtccccatcgggaggccttgagtggctgggaaggacattctacaggaccaagtggtatagtgaatctacaggctctctgaaaagtcgaataatcgtcaacccagacacatccaagaaccagttctccctacagctgaattctgtgactcccgaagacacggctgtctattactgtgcaagaggtgtccgccactttgactactggggccagggcaccctggtcaccgtctcctcagcctccaccaagggcccatcggtcttccccctggcaccctcctccaagagcacctctgggggcacagcggccctgggctgcctggtcaaggactacttccccgaaccggtgacggtgtcgtggaactcaggcgccctgaccagcggcgtgcacaccttcccggctgtcctacagtcctcaggactctactccctcagcagcgtggtgaccgtgccctccagcagcttgggcacccagacctacatctgcaacgtgaatcacaagcccagcaacaccaaggtggacaagaaagtg

SEQ ID NO: 2353 - DNA, 653 bp, synthetic construct
  misc_feature 1..653: note = Synthetic polynucleotide encoding artificial human antibody VH chain
  source 1..653: mol_type = other DNA
cccaggtgcagctgcaggagtcgggcccaggactggtgaagccttcggggaccctgtccctcacctgcgcagtctctggtggctccatcagcagtagtaactgctggagttgggtccgccagccccccgggaaggggctggagtggcttggggaaatctgtcatagtgggagcaccagctacaacccgtccctcaagagtcgagtcaccatatcagtcgacaagtctaagaaccagttctccctgaaactgcgctctgtgaccgccgcggacacggccgtgtattactgtgcgagagagtcacctttaactgtcgtctttgactactggggccagggaaccctggtcaccgtctcctcagcctccaccaagggcccatcggtcttccccctggcaccctcctccaagagcacctctgggggcacagcggccctgggctgcctggtcaaggactacttccccgaaccggtgacggtgtcgtggaactcaggcgccctgaccagcggcgtgcacaccttcccggctgtcctacagtcctcaggactctactccctcagcagcgtggtgaccgtgccctccagcagcttgggcacccagacctacatctgcaacgtgaatcacaagcccagcaacaccaaggtggacaagaaagtg

SEQ ID NO: 2354 - DNA, 645 bp, synthetic construct
  misc_feature 1..645: note = Synthetic polynucleotide encoding artificial human antibody VH chain
  source 1..645: mol_type = other DNA
gaggtgcagctggtggagtctgggggaggcttggtccagcctggggggtccctgagactctcctgtgcagcctctgggttcaccgtcagtagcaactacatgagctgggtccgccaggctccagggaaggggctggagtgggtctcagttatttatagcggtggtagcacatactacgcagactccgtgaagggccgattcaccatctccagagacaattccaagaacacgctgtctcttcaaatgaacagcctgagagccgaggacacggccgtgtattactgtgcgagggaatcctcagcagctggttatgactactggggccagggaaccctggtcaccgtctcctcagcctccaccaagggcccatcggtcttccccctggcaccctcctccaagagcacctctgggggcacagcggccctgggctgcctggtcaaggactacttccccgaaccggtgacggtgtcgtggaactcaggcgccctgaccagcggcgtgcacaccttcccggctgtcctacagtcctcaggactctactccctcagcagcgtggtgaccgtgccctccagcagcttgggcacccagacctacatctgcaacgtgaatcacaagcccagcaacaccaaggtggacaagagtgtg

SEQ ID NO: 2355 - DNA, 665 bp, synthetic construct
  misc_feature 1..665: note = Synthetic polynucleotide encoding artificial human antibody VH chain
  source 1..665: mol_type = other DNA
cccaggtgcagttggtgcagtcgggggctgaggtgaggaagcctggggcctcagtgaaggtttcctgcaaggcatctggatacaccttcaccacctactacatacactgggtgcgacaggcccctggacaagggcttgagtggatggggttaatcaaccctaatggtggtactactaactacgcacagaagttccagggcagactcagcatgaccacggacacgtccaccaacacagtctacatggagctgagtagcctgagatctgaagacacggccgtgtattactgtgcgagaaagcttatgtctggcatagtgtctcggggctggttcgacccctggggccagggaaccctggtcaccgtctcctcagcctccaccaagggcccatcggtcttccccctggcaccctcctccaagagcacctctgggggcacagcggccctgggctgcctggtcaaggactacttccccgaaccggtgacggtgtcgtggaactcaggcgccctgaccagcggcgtgcacaccttcccggctgtcctacagtcctcaggactctactccctcagcagcgtggtgaccgtgccctccagcagcttgggcacccagacctacatctgcaacgtgaatcacaagcccagcaacaccaaggtggacaagagtgtg

SEQ ID NO: 2356 - DNA, 660 bp, synthetic construct
  misc_feature 1..660: note = Synthetic polynucleotide encoding artificial human antibody VH chain
  source 1..660: mol_type = other DNA
cccgtgcagctgcaggagtcgggcccaggactggtgaagccttcggagaccctgtccctcacctgcactgtctctggtggctccgtcagcagtggtagttactactggagctggatccggcagcccccagggaagggactggagtggattgggtatatctattacagtgggagcaccaactacaacccctccctcaagagtcgagtcaccatatcagtagacacgtccaagaaccagttctccctgaagctgagctctgtgaccgctgcggacacggccgtgtattactgtgcgagagatcgcggtgactacgttacccactggttcgacccctggggccagggaaccctggtcaccgtctcctcagcctccaccaagggcccatcggtcttccccctggcaccctcctccaagagcacctctgggggcacagcggccctgggctgcctggtcaaggactacttccccgaaccggtgacggtgtcgtggaactcaggcgccctgaccagcggcgtgcacaccttcccggctgtcctacagtcctcaggactctactccctcagcagcgtggtgaccgtgccctccagcagcttgggcacccagacctacatctgcaacgtgaatcacaagcccagcaacaccaaggtggacaagagtgag

SEQ ID NO: 2357 - DNA, 657 bp, synthetic construct
  misc_feature 1..657: note = Synthetic polynucleotide encoding artificial human antibody VH chain
  source 1..657: mol_type = other DNA
cagctgcagctgcaggagtcgggcccaggactggtgaagccttgggagaccctgtccctcagttgcactgtctctggtggctccatcagcagtagtttcttctactggggctggatccgccagcccccagggaaggggctgcagtggattgggaatatccattatactgggagcacctactacaacccgtccctcaagagtcgaatcaccatgtccgtagacacgtccaagaaccagttctccctgaagctgagctctgtgaccgccgcagacacggctgtgtattactgtgcgagacatagggttggcgacagcccgggactccactactggggccagggaaccctggtcaccgtctcctcagcctccaccaagggcccatcggtcttccccctggcaccctcctccaagagcacctctgggggcacagcggccctgggctgcctggtcaaggactacttccccgaaccggtgacggtgtcgtggaactcaggcgccctgaccagcggcgtgcacaccttcccggctgtcctacagtcctcaggactctactccctcagcagcgtggtgaccgtgccctccagcagcttgggcacccagacctacatctgcaacgtgaatcacaagcccagcaacaccaaggtggacaagagtgag

SEQ ID NO: 2358 - DNA, 651 bp, synthetic construct
  misc_feature 1..651: note = Synthetic polynucleotide encoding artificial human antibody VH chain
  source 1..651: mol_type = other DNA
caggtgcagctggtggagtctgggggaggcgtggtccagcctgggaggtccctgagactctcctgtgcagcctctggattcaccttcagtagctatgctatgcactgggtccgccaggctccaggcaaggggctagagtgggtggcagttatatcatatgatggaagtaataaatactacgcagactccgtgaagggccgattcaccatctccagagacaattccaagaacacgctgtatctgcaaatgaacagcctgagagctgaggacacggctgtgtattactgtgcgagccctatagcagtggctgccccctttgcctactggggccagggaaccctggtcaccgtctcctcagcctccaccaagggcccatcggtcttccccctggcaccctcctccaagagcacctctgggggcacagcggccctgggctgcctggtcaaggactacttccccgaaccggtgacggtgtcgtggaactcaggcgccctgaccagcggcgtgcacaccttcccggctgtcctacagtcctcaggactctactccctcagcagcgtggtgaccgtgccctccagcagcttgggcacccagacctacatctgcaacgtgaatcacaagcccagcaacaccaaggtggacaagagtgag

SEQ ID NO: 2359 - DNA, 688 bp, synthetic construct
  misc_feature 1..688: note = Synthetic polynucleotide encoding artificial human antibody VH chain
  source 1..688: mol_type = other DNA
gtgtgaggtgcaactgttggagtctgggggaggcttggtacagcctggggggtccctgagactctcctgtgcagcctctggattcacctttagcacctatgtcatgagctgggtccgccaggctccagggaaggggctggagtgggtctcattaattagtggcagtggtggtagcacacactacgcagactccgtgaggggccggttcaccatctccagagacaattccaagaatacgctgtatctgcaaatgaacagtctgagagccgaggacacggccgtatattactgtgtgaaggattatcttgctgttggtgggacctactacgactactttgactactggggccagggaaccctggtcaccgtctcctcagggagtgcatccgccccaacccttttccccctcgtctcctgtgagaattccccgtcggatacgagcagcgtggccgttggctgcctcgcacaggacttccttcccgactccatcactttctcctggaaatacaagaacaactctgacatcagcagcacccggggcttcccatcagtcctgagagggggcaagtacgcagccacctcacaggtgctgctgccttccaaggacgtcatgcagggcacagacgaacacgtggtgtgcaaagtccagcaccccaacggcaacaaagaaaagaacgtgcctcttccg

SEQ ID NO: 2360 - DNA, 651 bp, synthetic construct
  misc_feature 1..651: note = Synthetic polynucleotide encoding artificial human antibody VH chain
  source 1..651: mol_type = other DNA
cccctgcagctgcaggagtcgggcccaggactggtgaagccttcggagaccctgtccctcacctgcactgtctctggtggctccatcagcagtagtagttactactggggctggatccgccagtccccagggaaggggctggagtggatggggagtatctattatagtgggagcacctactacaacccgtccctcaagagtcgagtcaccatatccgtagacacgtccaagaaccagttctccctgaacctgagctctgtgaccgccgcagacacggctgtgtattactgtgcgagacatgactaccgtaactactttgactactggggccagggaaccctggtcaccgtctcctcagcctccaccaagggcccatcggtcttccccctggcaccctcctccaagagcacctctgggggcacagcggccctgggctgcctggtcaaggactacttccccgaaccggtgacggtgtcgtggaactcaggcgccctgaccagcggcgtgcacaccttcccggctgtcctacagtcctcaggactctactccctcagcagcgtggtgaccgtgccctccagcagcttgggcacccagacctacatctgcaacgtgaatcacaagcccagcaacaccaaggtggacaagagtgag

SEQ ID NO: 2361 - DNA, 662 bp, synthetic construct
  misc_feature 1..662: note = Synthetic polynucleotide encoding artificial human antibody VH chain
  source 1..662: mol_type = other DNA
cccaggtgcagctggtgcagtctggggctgaggtgaagaagcctggggcctcagtgaaggtctcctgccaggcttctggatacaccttcaccggctactatatacactgggtgcgacaggcccctggacaagggcttgagtggatgggatggatcaaccctaacagtggtggcacaaactatgcacagaagtttcagggcagggtcaccatgaccagggacacgtccatcagcacagcccacatggagctgggcaggctgagatctgacgacacggccgtgtattactgtgcgaccccaccgtctcgatatggtggaaactactacgcagactactggggccagggaaccctggtcaccgtctcctcagcctccaccaagggcccatcggtcttccccctggcaccctcctccaagagcacctctgggggcacagcggccctgggctgcctggtcaaggactacttccccgaaccggtgacggtgtcgtggaactcaggcgccctgaccagcggcgtgcacaccttcccggctgtcctacagtcctcaggactctactccctcagcagcgtggtgaccgtgccctccagcagcttgggcacccagacctacatctgcaacgtgaatcacaagcccagcaacaccaaggtggacaagaaggtg

SEQ ID NO: 2362 - DNA, 648 bp, synthetic construct
  misc_feature 1..648: note = Synthetic polynucleotide encoding artificial human antibody VH chain
  source 1..648: mol_type = other DNA
ccggtgcagctggtgcagtctggagcagaggtgaaaaagcccggggactctctgagcatctcctgtgaggtttctggatacagctttaccagctactggattggctgggtgcgccagatgcccgggaaaggcctggagtggatggcgatcatcaatcctgctgactctgataccagatacagtccgtccttccgaggccaggtcaccatctcagtcgacaagtccatcaacaccgcctacctgcagtggaccagcctgcaggcctcggacaccgccatgtattactgtgcgagacaagggccgacagtagcgattgacttctggggccagggaaccctggtcaccgtctcctcagcctccaccaagggcccatcggtcttccccctggcaccctcctccaagagcacctctgggggcacagcggccctgggctgcctggtcaaggactacttccccgaaccggtgacggtgtcgtggaactcaggcgccctgaccagcggcgtgcacaccttcccggctgtcctacagtcctcaggactctactccctcagcagcgtggtgaccgtgccctccagcagcttgggcacccagacctacatctgcaacgtgaatcacaagcccagcaacaccaaggtggacaagagtgag

SEQ ID NO: 2363 - DNA, 349 bp, synthetic construct
  misc_feature 1..349: note = Synthetic polynucleotide encoding artificial human antibody VH chain
  source 1..349: mol_type = other DNA
gaggtgcagctggtgcagtctggagcagaggtgaaaaagcccggggagtctctgaagatctcctgtaagggttctggatacagctttaccacctactggatcgcctgggtgcgccagatgcccgggaaaggcctggagtggatggggatcatctatcctgctgactctgataccagatacagcccgtccttccaaggccaggtcaccatgtcagccgaccagtccatcaataccgcctacctgcagtggagcagcctgaaggcctcggacaccgccatgtattactgtgcgagacggggtagagagtttgattactggggccagggaaccctgctcaccgtctcctcag

SEQ ID NO: 2364 - DNA, 670 bp, synthetic construct
  misc_feature 1..670: note = Synthetic polynucleotide encoding artificial human antibody VH chain
  source 1..670: mol_type = other DNA
gtgtgaggtgcagctgttggagtctgggggaggcttggtgcagcctggggggtccctgagactctcctgtgcagcctctggattcacctttagaatctatgccatgagctgggtccgccaggctccagggaaggggctggagtgggtctcagctatcagttatagtggtaataccacatactacgcagactccgtgaagggccgtttcaccatctccagagacaattccaagaacacgctgtatctgcaaatcaacaacctaagagccgaggacacggccatatattactgtgcgatccaggaaaaacgggaactgcaactacgtcgagaactagataactactggggccagggaaccctggtcaccgtctcctcagcctccaccaagggcccatcggtcttccccctggcaccctcctccaagagcacctctgggggcacagcggccctgggctgcctggtcaaggactacttccccgaaccggtgacggtgtcgtggaactcaggcgccctgaccagcggcgtgcacaccttcccggctgtcctacagtcctcaggactctactccctcagcagcgtggtgaccgtgccctccagcagcttgggcacccagacctacatctgcaacgtgaatcacaagcccagcaacaccaaggtggacaagaaagtg

SEQ ID NO: 2365 - DNA, 351 bp, synthetic construct
  misc_feature 1..351: note = Synthetic polynucleotide encoding artificial human antibody VH chain
  source 1..351: mol_type = other DNA
caggtgcagctggtgcagtctggggctgaggtgaagaagcctggggcctcagtgaaggtttcctgcaaggcatctggatacaccttcaccagctactatatgtactgggtgcgacaggcccctggacaagggcttgagtggatgggaataatcaaccctggtggtggtagcacaagctacgcacagaagttccagggcagagtcaccatgaccagggacacgtccacgagcacagtctacatggagctgagcagcctgagatctgaggacacggccgtgtattactgtgcgagagtatttcgatacggtatggacgtctggggccaagggaccacggtcaccgtctcctca

SEQ ID NO: 2366 - DNA, 352 bp, synthetic construct
  misc_feature 1..352: note = Synthetic polynucleotide encoding artificial human antibody VH chain
  source 1..352: mol_type = other DNA
caggtgcaggtggtggaatctgggggaggcttggtcaagcctggagggtccctgagactctcctgtgcagtctctggattagacttcagggactactatgtaaactggatccgtcaggctccggggaaggggctggagtggctttcctacattactagtcctggtggtcacacaagctactcagactctgtgaagggccgattcaccatctccagagacaacgccaagaattcagtgtatctccaaatggacagcctgacagtcgaggacacggccgtatatttctgtgcgatcaaagaaggctacggtctttcagactggggccagggaaccctggtcaccgtctcgtcag

SEQ ID NO: 2367 - DNA, 669 bp, synthetic construct
  misc_feature 1..669: note = Synthetic polynucleotide encoding artificial human antibody VH chain
  source 1..669: mol_type = other DNA
gtggtgcagctgttggagtctgggggaggcttggtacagcctggggggtccctgagactctcctgtgcagcctctggattcacctttatcagttatgccatgagctgggtccgccaggctccagggaaggggctggagtgggtctcagatattagtggcagtggtggtagcacatactacgcagactccgtgaagggccggctcaccatctccagagacaattccaacaacacgctgtatttgcaaatgaacagcctgagagccgaggacacggccgtatattactgtgcgaaagaggatggctacactcaaaattttgactactggggccagggaaccctggtcaccgtctcctcagggagtgcatccgccccaacccttttccccctcgtctcctgtgagaattccccgtcggatacgagcagcgtggccgttggctgcctcgcacaggacttccttcccgactccatcactttctcctggaaatacaagaacaactctgacatcagcagcacccggggcttcccatcagtcctgagagggggcaagtacgcagccacctcacaggtgctgctgccttccaaggacgtcatgcagggcacagacgaacacgtggtgtgcaaagtccagcaccccaacggcaacaaagaaaagaacgtgcctcttcca

SEQ ID NO: 2368 - DNA, 364 bp, synthetic construct
  misc_feature 1..364: note = Synthetic polynucleotide encoding artificial human antibody VH chain
  source 1..364: mol_type = other DNA
caggtccaacttgtgcagtctggggccgaggtgaagaagccaggggcctcagtgaagatttcctgcaaggcctctggatacaccttcactagtcatgccatacactgggtgcgccaggcccccggacaaacttttgagtggctgggctggatcaaccctgtcaatggggtcacaaaatattcacagacgtttcaggacagagtcaccattgtgagggacaagtccgcgaccacaacctacatggacctgagcgggctgacatttgaagacacggctatgtattattgtgcgagagttctggacttttatggaagtagtgtcctagactactggggccagggaaccctggtcactgtctcctcag

SEQ ID NO: 2369 - DNA, 346 bp, synthetic construct
  misc_feature 1..346: note = Synthetic polynucleotide encoding artificial human antibody VH chain
  source 1..346: mol_type = other DNA
cacgtgcagctggtgcaatctgggtctgagttgaagaagcctggggcctcagtgaaactttcctgcaaggcttctggatacaccttcactaactatgctatgaattgggtgcgacaggcccctggacaagggcttgagtggatggggtggatcaacaccaacactgggaacccaacgtatgcccagggcttcacaggacggtttgtcttctccttggacacctctgtcagcacggcatatctgcagatcagcagcctaaaggctgaggacactgccctgtattactgtgcgagagatcggcccggggactactggggccagggaaccctggtcaccgtctcctcag

SEQ ID NO: 2370 - DNA, 648 bp, synthetic construct
  misc_feature 1..648: note = Synthetic polynucleotide encoding artificial human antibody VH chain
  source 1..648: mol_type = other DNA
caggtgcagctggtggagtctgggggaggcgtggtccagcctgggaggtccctgagactctcctgtgcagcctctggattcaccttcagtaactttgctatgcactgggtccgccaggctccaggcaaggggttggagtgggtggtggttatttcatctgatggaagcaataaaaactacgcagactccgtgaagggccgattcaccatctccagagacaattccaagaacacgctgtatctgcaaatgaacagcctgagagctgaggacacggctgtgtattactgtgcgagagatcttggtgtgggatctactacctactggggccagggaaccctggtcaccgtctcctcagcctccaccaagggcccatcggtcttccccctggcaccctcctccaagagcacctctgggggcacagcggccctgggctgcctggtcaaggactacttccccgaaccggtgacggtgtcgtggaactcaggcgccctgaccagcggcgtgcacaccttcccggctgtcctacagtcctcaggactctactccctcagcagcgtggtgaccgtgccctccagcagcttgggcacccagacctacatctgcaacgtgaatcacaagcccagcaacaccaaggtggacaagagagtc

SEQ ID NO: 2371 - DNA, 657 bp, synthetic construct
  misc_feature 1..657: note = Synthetic polynucleotide encoding artificial human antibody VH chain
  source 1..657: mol_type = other DNA
ggggagcagctgttggagtctgggggaggcttggttcagccgggggggtccctgagactctcctgtgcagcctctggattcaccttcagtcactacgccatgacctgggtccgccaggctccagggaaggggctcgaatgggtctcaggtgttagtggaagtggttttaccacttattacgcagactccgttaagggccggttcaccatctcccgagacaatgcccagaacacactgtatctgcacatgaacagcctgagagccgaggacacggccatatattactgtgtgaaagatttggaggtttctataggtcacaattttgacttttggggccagggaaccctggtcaccgtctcctcagcctccaccaagggcccatcggtcttccccctggcaccctcctccaagagcacctctgggggcacagcggccctgggctgcctggtcaaggactacttccccgaaccggtgacggtgtcgtggaactcaggcgccctgaccagcggcgtgcacaccttcccggctgtcctacagtcctcaggactctactccctcagcagcgtggtgaccgtgccctccagcagcttgggcacccagacctacatctgcaacgtgaatcacaagcccagcaacaccaaggtggacaagagagtc

SEQ ID NO: 2372 - DNA, 675 bp, synthetic construct
  misc_feature 1..675: note = Synthetic polynucleotide encoding artificial human antibody VH chain
  source 1..675: mol_type = other DNA
gaggtgcagctggtggagtctgggggaggcctggtcaagcctggggggtccctgagactctcctgtgcagcctctggattcaccttcagtagctatagcatgaactgggtccgccaggctccagggaaggggctggagtgggtctcatccattagtagtagtagtagttacatatactacgcagactcagtgaagggccgattcaccatctccagagacaacgccaagaactcactgtatctgcaaatgaacagcctgagagccgaggacacggctgtgtattactgtgcgagagataggggggtagtggtggtagctgctaccccttactactacggtatggacgtctggggccaagggaccacggtcaccgtctcctcagcctccaccaagggcccatcggtcttccccctggcaccctcctccaagagcacctctgggggcacagcggccctgggctgcctggtcaaggactacttccccgaaccggtgacggtgtcgtggaactcaggcgccctgaccagcggcgtgcacaccttcccggctgtcctacagtcctcaggactctactccctcagcagcgtggtgaccgtgccctccagcagcttgggcacccagacctacatctgcaacgtgaatcacaagcccagcaacaccaaggtggacaagaaagtc

SEQ ID NO: 2373 - DNA, 669 bp, synthetic construct
  misc_feature 1..669: note = Synthetic polynucleotide encoding artificial human antibody VH chain
  source 1..669: mol_type = other DNA
cagatcaccttgaaggagtctggtcctacgctggtgaaacccacacagaccctcactctgacctgcaccttctctgggttctcactcagtactaatggagtgggtgtgggctggatccgtcagcccccaggaaaggccctggagtggcttgcactcattaattgggatgatgataagcgctacagtccatctctgaagagcaggctcaccatcactaaggacacctccaaaaaccaggttgtccttacaatgaccaacctggaccctgtagacacagccacatattactgtgtacacgcacgagatgactacggtgactccgcttggtcaactgggcctgtctggggccagggaaccctggtcaccgtctcctcagcctccaccaagggcccatcggtcttccccctggcaccctcctccaagagcacctctgggggcacagcggccctgggctgcctggtcaaggactacttccccgaaccggtgacggtgtcgtggaactcaggcgccctgaccagcggcgtgcacaccttcccggctgtcctacagtcctcaggactctactccctcagcagcgtggtgaccgtgccctccagcagcttgggcacccagacctacatctgcaacgtgaatcacaagcccagcaacaccaaggtggacaagagagtt

SEQ ID NO: 2374 - DNA, 669 bp, synthetic construct
  misc_feature 1..669: note = Synthetic polynucleotide encoding artificial human antibody VH chain
  source 1..669: mol_type = other DNA
ctgatcaccttgaaggagtctggtcctacgctggtgaaacccacacagaccctcacgctgacctgcaccgtctctgggttgtcactcagcactagtggagtggctgtgggctggatccgtcagcccccaggaaaggccctggagtggcttgcactcatttattgggatgatgatacgcggtacagcccatctctgaagagcaggctcagcatcaccaaggacacctccaaaaaccaggtggtccttacaatgagaaacgtggaccctgtggacacagccacatattactgtggacacagacgtctgttaaggggggttactactactgtctatttcgacccctggggccagggaaccctggtcaccgtctcctcagcctccaccaagggcccatcggtcttccccctggcaccctcctccaagagcacctctgggggcacagcggccctgggctgcctggtcaaggactacttccccgaaccggtgacggtgtcgtggaactcaggcgccctgaccagcggcgtgcacaccttcccggctgtcctacagtcctcaggactctactccctcagcagcgtggtgaccgtgccctccagcagcttgggcacccagacctacatctgcaacgtgaatcacaagcccagcaacaccaaggtggacaagagagtc

SEQ ID NO: 2375 - DNA, 669 bp, synthetic construct
  misc_feature 1..669: note = Synthetic polynucleotide encoding artificial human antibody VH chain
  source 1..669: mol_type = other DNA
ccggtgcagctgcaggagtcgggcccaggacttgtgaacccttcacagaccctgtccctcacctgcactgtctctggtggctccatcagcagcggtggttactgctggagctgggtccgccagcacccagggaagggcctggaatggattgggtgcatctattacattgggaccacctactacatgcggtccctcaagagtcgacttatcatatcaatagacacgtctaagaaccagttctccctgaagctgacctctgtgactgccgcggactcggccgtgtattactgtgcgagaggaggggagctgctgggcggattcggctacagtggtatggacgtctggggccaagggaccacggtcaccgtctcctcagcttccaccaagggcccatccgtcttccccctggcgccctgctccaggagcacctccgagagcacagccgccctgggctgcctggtcaaggactacttccccgaaccggtgacggtgtcgtggaactcaggcgccctgaccagcggcgtgcacaccttcccggctgtcctacagtcctcaggactctactccctcagcagcgtggtgaccgtgccctccagcagcttgggcacgaagacctacacctgcaacgtagatcacaagcccagcaacaccaaggtggacaagagagtt

SEQ ID NO: 2376 - DNA, 672 bp, synthetic construct
  misc_feature 1..672: note = Synthetic polynucleotide encoding artificial human antibody VH chain
  source 1..672: mol_type = other DNA
gagctgcagctggtggagtctgggggaggcttggtccagcctggggggtccctgcgactctcctgtgcagcctctggattcacctttagtagctattggatgagctgggtccgccaggctccagggaaggggctggagtgggtggccaacataaaccaagatggaggtgagaaatactatgtggactctgtgaagggccgattcaccatctccagagacaacgccaagaactcactgtatctgcaaatgaacagcctgagagccgaggacacggccgtgtattactgtgcgcattattattatgatagtagtggttattaccaaaacgctgaatacttccagtactggggccagggcaccctggtcaccgtctcctcagcctccaccaagggcccatcggtcttccccctggcaccctcctccaagagcacctctgggggcacagcggccctgggctgcctggtcaaggactacttccccgaaccggtgacggtgtcgtggaactcaggcgccctgaccagcggcgtgcacaccttcccggctgtcctacagtcctcaggactctactccctcagcagcgtggtgaccgtgccctccagcagcttgggcacccagacctacatctgcaacgtgaatcacaagcccagcaacaccaaggtggacaagaaagtg

SEQ ID NO: 2377 - DNA, 678 bp, synthetic construct
  misc_feature 1..678: note = Synthetic polynucleotide encoding artificial human antibody VH chain
  source 1..678: mol_type = other DNA
caggttcagctggtgcagtctggggctgaagttaagaagcctgggtcctcggtgaaggtctcctgtaaggcttctagaggcaccttcagcaaccatgctgtcagctgggtgcgacaggcccccggacaagggcttgagtgggtgggagggatcatccctgtctttggtccaccaaactacgcacagaagttccggggcagagtcacgattaccgcggacagatccacgaacacagcctacatggagctgaacagcctgagatctgaggacacggccgtatattactgtgcgagaacccagtgggggaccgatgtagaggcaacgaatccctactactatttcatggacgtctggggcaaagggaccacggtcaccgtctcctcagcctccaccaagggcccatcggtcttccccctggcaccctcctccaagagcacctctgggggcacagcggccctgggctgcctggtcaaggactacttccccgaaccggtgacggtgtcgtggaactcaggcgccctgaccagcggcgtgcacaccttcccggctgtcctacagtcctcaggactctactccctcagcagcgtggtgaccgtgccctccagcagcttgggcacccagacctacatctgcaacgtgaatcacaagcccagcaacaccaaggtggacaagagagtg

SEQ ID NO: 2378 - DNA, 651 bp, synthetic construct
  misc_feature 1..651: note = Synthetic polynucleotide encoding artificial human antibody VH chain
  source 1..651: mol_type = other DNA
caggtgcagctggtgcagtctgggactgagatgaagaggcctgggtcctcggtgaaggtctcctgcaaggcttctggaggcaccttcaacttctatgctatcaactgggtgcgacaggcccctggacaagggcttgagtggatgggagggatcgtccctatctttgatacaacaacttacgcacagaggttccagggcagagtcaccattacggcggacgagtccacgaccacagtccacatggaactgagcagcctgagatttgacgacacggccgtctattactgtgcgcgagatcagagtggagctgacagatttgactcctggggccagggaaccctggtcaccgtctcctcagcctccaccaagggcccatcggtcttccccctggcaccctcctccaagagcacctctgggggcacagcggccctgggctgcctggtcaaggactacttccccgaaccggtgacggtgtcgtggaactcaggcgccctgaccagcggcgtgcacaccttcccggctgtcctacagtcctcaggactctactccctcagcagcgtggtgaccgtgccctccagcagcttgggcacccagacctacatctgcaacgtgaatcacaagcccagcaacaccaaggtggacaagagtgag

SEQ ID NO: 2379 - DNA, 654 bp, synthetic construct
  misc_feature 1..654: note = Synthetic polynucleotide encoding artificial human antibody VH chain
  source 1..654: mol_type = other DNA
caggtccagcttgtgcagtctggggctgaggtgaagaagcctggggcctcagtgaaaatttcctgtcaggcttttggatataacttcattgacaatgctatacattgggtgcgccaggcccccggacaaaggcctgagtggatgggatggatcaacgctggcaatgggaacacaagatattcacagaatttccagggcagagtcaccataaccaaagtcacatccgcgagcacagcctacatggagatgagccgcctgaaatctgaggacacggctgtgtatttctgtgcgagatcttcgaagtggacggactggcattttgactactggggccagggaaccctggtcaccgtctcctcagcctccaccaagggcccatcggtcttccccctggcaccctcctccaagagcacctctgggggcacagcggccctgggctgcctggtcaaggactacttccccgaaccggtgacggtgtcgtggaactcaggcgccctgaccagcggcgtgcacaccttcccggctgtcctacagtcctcaggactctactccctcagcagcgtggtgaccgtgccctccagcagcttgggcacccagacctacatctgcaacgtgaatcacaagcccagcaacaccaaggtggacaagagtgag

SEQ ID NO: 2380 - DNA, 659 bp, synthetic construct
  misc_feature 1..659: note = Synthetic polynucleotide encoding artificial human antibody VH chain
  source 1..659: mol_type = other DNA
cccagattcaactggtccagtctggagctgaggtgaagaagcctggggcctcagtgaaggtctcctgcaagacttctggttacacttttacccactatggtgtcgcctgggtgcgacaggcccctggacaagggcctgagtggatgggatggatcagcccttacaatggtaacatagagtatggacagaagttccaggggagagtcactatgaccacagacacatcgacgaatacagcctacatggagctgaggagcctgagatatgacgacacggccgtctattactgtgcgagagatctcgacgaaataaatagttcttggctcgacccctggggccagggaaccctgatcatcgtctccccagcctccaccaagggcccatcggtcttccccctggcaccctcctccaagagcacctctgggggcacagcggccctgggctgcctggtcaaggactacttccccgaaccggtgacggtgtcgtggaactcaggcgccctgaccagcggcgtgcacaccttcccggctgtcctacagtcctcaggactctactccctcagcagcgtggtgaccgtgccctccagcagcttgggcacccagacctacatctgcaacgtgaatcacaagcccagcaacaccaaggtggacaagagtgag

SEQ ID NO: 2381 - DNA, 678 bp, synthetic construct
  misc_feature 1..678: note = Synthetic polynucleotide encoding artificial human antibody VH chain
  source 1..678: mol_type = other DNA
gtggtgcagttgttggagtctgggggaggcgtggtacagccgggggggtccctgagactctcctgtgcagcctctggattcacctttagcaactatgccatgaactgggtccgccaggctccagggaaggggctggagtgggtcacaggcattagtggtcctggtgaaagttcatactacgcagactccgtgaagggccggttcaccgtctccagagacaattacaggaacactctatatctgcaaatgaacgacttgggagccgaagacacggccacatatttctgtgcgaaacgccccaccgctggaaacagctatggtggatactactttgaccattggggccagggaaccctggtcaccgtctcctcagcatccccgaccagccccaaggtcttcccgctgagcctctgcagcacccagccagatgggaacgtggtcatcgcctgcctggtccagggcttcttcccccaggagccactcagtgtgacctggagcgaaagcggacagggcgtgaccgccagaaacttcccacccagccaggatgcctccggggacctgtacaccacgagcagccagctgaccctgccggccacacagtgcctagccggcaagtccgtgacatgccacgtgaagcactacacgaatcccagccaggatgtgactgtgccctgccca

SEQ ID NO: 2382 - DNA, 672 bp, synthetic construct
  misc_feature 1..672: note = Synthetic polynucleotide encoding artificial human antibody VH chain
  source 1..672: mol_type = other DNA
caggtgcaactggtgcagtctggggctgaggtgaagaagcctggggcctcagtgaagctttcctgcaagccatctggatacaccttcagcagctactatatccactggctgcgacaggcccctggacaagggcttgagtggatgggaataatcaaccctagcggtggttacacaagctccgcacagaaattccagggcagagtcaccatgaccagggacacgtccacgagcacaatctacatggagctgagcagcctgagagctgaggacacggccgtgtattactgtgcgagacggggcgaagtcgggactatggttcgggttttccgaaagccgtttgactactggggccagggaaccctggtcaccgtctcctccgcctccaccaagggcccatcggtcttccccctggcaccctcctccaagagcacctctgggggcacagcggccctgggctgcctggtcaaggactacttccccgaaccggtgacggtgtcgtggaactcaggcgccctgaccagcggcgtgcacaccttcccggctgtcctacagtcctcaggactctactccctcagcagcgtggtgaccgtgccctccagcagcttgggcacccagacctacatctgcaacgtgaatcacaagcccagcaacaccaaggtggacaagaaggtg

SEQ ID NO: 2383 - DNA, 669 bp, synthetic construct
  misc_feature 1..669: note = Synthetic polynucleotide encoding artificial human antibody VH chain
  source 1..669: mol_type = other DNA
ccggtgcagctggtgcagtctggagcagaggtgaaaaagcccggggagtctctgaagatctcctgtcagggttctggatacaactttagtcgctactggatcggctgggtgcgccagatgcccgggaaaggcctggagtggatgggggtcgtctttcctggtgactctgatatcagatacagcctgtccttccaaggccacatcaccatctacgccgacaactccatcagcaccgcctacctccagtggagcagcctgaaggcctcggacaccgccatttattactgtgcgacaacctcgactatgccaatgcctactagagggagagactggttcgacccctggggccagggaaccctggtcaccgtctcctcagcctccaccaagggcccatcggtcttccccctggcaccctcctccaagagcacctctgggggcacagcggccctgggctgcctggtcaaggactacttccccgaaccggtgacggtgtcgtggaactcaggcgccctgaccagcggcgtgcacaccttcccggctgtcctacagtcctcaggactctactccctcagcagcgtggtgaccgtgccctccagcagcttgggcacccagacctacatctgcaacgtgaatcacaagcccagcaacaccaaggtggacaagagagtg

SEQ ID NO: 2384 - DNA, 648 bp, synthetic construct
  misc_feature 1..648: note = Synthetic polynucleotide encoding artificial human antibody VH chain
  source 1..648: mol_type = other DNA
caggtgcagctggtggagtctgggggaggcgtggtccagcctgggacgtccctgacactgtcctgtgaagcgtctggattcaccttcaatagatatggcatgcactgggtccgtcaggctccaggcaaggggctggaatgggtggcagtaatatggtatgatggaaccaacaagtattatgctgactccgtgaggggccgattcaccatctccagagacaattccaagaacaccctttatctgcaaatgaacacactgagaggcgacgacacggctgtgtacttttgtgcgggtgcccacggtgactacggtcttgactattggggccagggaaccctggtcaccgtctcctcagcctccaccaagggcccatcggtcttccccctggcaccctcctccaagagcacctctgggggcacagcggccctgggctgcctggtcaaggactacttccccgaaccggtgacggtgtcgtggaactcaggcgccctgaccagcggcgtgcacaccttcccggctgtcctacagtcctcaggactctactccctcagcagcgtggtgaccgtgccctccagcagcttgggcacccagacctacatctgcaacgtgaatcacaagcccagcaacaccaaggtggacaagagagag

SEQ ID NO: 2385 - DNA, 660 bp, synthetic construct
  misc_feature 1..660: note = Synthetic polynucleotide encoding artificial human antibody VH chain
  source 1..660: mol_type = other DNA
gaagtgcagctggtgcagtctggagcagaggtgaaaaagcccggggagtctctgaggatctcctgtaagggttctggatacagctttaccagcttctggatcagctgggtgcgccagatgcccgggaaaggcctggagtggatggggaggattgatcctagtgactcttataccaactacagcccgtccttccaaggccacgtcaccatctcagctgacaagtccatcagcactgccttcctgcagtggagcagcctgaaggcctcggacaccgccatgtattactgtgcgagacatcagcagaagtatagccccatttccccgcttgactactggggccagggaaccctggtcaccgtctcctcagcctccaccaagggcccatcggtcttccccctggcaccctcctccaagagcacctctgggggcacagcggccctgggctgcctggtcaaggactacttccccgaaccggtgacggtgtcgtggaactcaggcgccctgaccagcggcgtgcacaccttcccggctgtcctacagtcctcaggactctactccctcagcagcgtggtgaccgtgccctccagcagcttgggcacccagacctacatctgcaacgtgaatcacaagcccagcaacaccaaggtggacaagagagtt

SEQ ID NO: 2386 - DNA, 360 bp, synthetic construct
  misc_feature 1..360: note = Synthetic polynucleotide encoding artificial human antibody VH chain
  source 1..360: mol_type = other DNA
gaagtgcagctggtggagtcggggggaggcgtgatcaagcctggggggtccctgaaactctcctgtgaaggctctggattcaccctggatgattatgtcatgcactgggtccgtcaggctccagggaagggtctggagtggatctcttctattagtggggatggtactcggacatattatgcagactctgtgaagggccgattcaccatctccagaaacaacggcaaaaattccctgtatctgcaaatggacagtctgagaagggaagacaccgccttgtattactgtgcaaaagacgcacgcctggcttattatggtatggacgtctggggccaagggaccacggtcaccgtctcctca

SEQ ID NO: 2387 - DNA, 364 bp, synthetic construct
  misc_feature 1..364: note = Synthetic polynucleotide encoding artificial human antibody VH chain
  source 1..364: mol_type = other DNA
cagctgcagctgcaggagtcgggcccaggactggtgaagccttcggagaccctgtccctcacctgcactgtctctggtgactccatcagtagtagcggtttcttctgggcctggatccgccaggccccagggaagggcctggactggattggcagcacttatcatcgcacaactaccacctactacaacccgtccctcaagagtcgagtcaccatatccgtagacacgtccaagaaccagttctccctgaccctgaactctctgaccgccgcagacacggctgtctattactgtgcgagacactcgagtggttattcagaacttgcctactggggccagggaaccctggtcatcgtctccacag

SEQ ID NO: 2388 - DNA, 669 bp, synthetic construct
  misc_feature 1..669: note = Synthetic polynucleotide encoding artificial human antibody VH chain
  source 1..669: mol_type = other DNA
caggagcaactggtgcagtctggggctgaggtgaagaagcctgggtcgtcggtgaaggtctcctgcaaggtttctggaggccccttcaagacctaccctatcaactgggtgcgacaggcccctggacaagggcttgagtggatgggagggatcacccctaattctggcacaccaaactacgcccagaagttccagggcagagtcacaattaccgcggacgaatccacgactacagtctacatgcaactgagcagcctgagatctgaggacacggccgtgtattactgtgcgagagtccacaattgggacttctactacggtatggacgtctggggcctagggaccacggtcaccgtctcctcagcatccccgaccagccccaaggtcttcccgctgagcctctgcagcacccagccagatgggaacgtggtcatcgcctgcctggtccagggcttcttcccccaggagccactcagtgtgacctggagcgaaagcggacagggcgtgaccgccagaaacttcccacccagccaggatgcctccggggacctgtacaccacgagcagccagctgaccctgccggccacacagtgcctagccggcaagtccgtgacatgccacgtgaagcactacacgaatcccagccaggatgtgactgtgccctgccca

SEQ ID NO: 2389 - DNA, 678 bp, synthetic construct
  misc_feature 1..678: note = Synthetic polynucleotide encoding artificial human antibody VH chain
  source 1..678: mol_type = other DNA
gaggtgcaggtggtggagtctgggggaggcttggtacagccagggcggtccctgagactctcctgtacaccttctggattcacctttggtgataatgctatgggctggttccgccaggctccagggaaggggctggagtgggtaggtttcattagaagcaaagcttatggtgggacaagagactacgccgcgtctgtgaaaggcagattcaccatctcaagagatgactccaaaagcatcgcctatctgcaaatgaacagcctgaaaaccgaggacacagccgtttattactgtactagagagaggccccctaattgtggatctagctgccccgagacctggggccagggaaccctggtcaccgtctcttcagcatccccgaccagccccaaggtcttcccgctgagcctctgcagcacccagccagatgggaacgtggtcatcgcctgcctggtccagggcttcttcccccaggagccactcagtgtgacctggagcgaaagcggacagggcgtgaccgccagaaacttcccacccagccaggatgcctccggggacctgtacaccacgagcagccagctgaccctgccggccacacagtgcctagccggcaagtccgtgacatgccacgtgaagcactacacgaatcccagccaggatgtgactgtgccctgccca

SEQ ID NO: 2390 - DNA, 358 bp, synthetic construct
  misc_feature 1..358: note = Synthetic polynucleotide encoding artificial human antibody VH chain
  source 1..358: mol_type = other DNA
caggttcagctggtacagtctggaagtgaggtgaagaagcctggggcctccgtgaggctcgcctgcaagacctctggttacacctttagtaattacggtgtctcctgggtgcgacagggccctggccgaggacttgagtggctgggctggataagcggttacaatggaagaacacactctgcagacaagtttcgggacagagtcaccctgaccacagacacatccacaaccacagtctacgtggacctgaagaacctgacctctgacgacacggccgtgtattattgtgcgagagtcgggacatctcattggtactctgattcttggggccagggaaccctggtcaccgtctcctcag

SEQ ID NO: 2391 - DNA, 352 bp, synthetic construct
  misc_feature 1..352: note = Synthetic polynucleotide encoding artificial human antibody VH chain
  source 1..352: mol_type = other DNA
gaggtacagttggtggagtctgggggagggatggtccagcctggggaatcactcagactctcgtgcgcagcctctggattcgactttacttcgtattggatggcctgggtccgccaggctccagggaaggggctggagtgggtggccaatatgaacgcagatgggagtgagaaacactatgtggactctgtgaaggggcgattcagcatatccagagacaacgcgaagaagttactgtttctgcaaatgaacagcctgacagttgacgatacaggtgtctattattgtgcgagagacgaggggcgaagagagggcgcctggggccagggaacccaggtcatcgtttccgctg

SEQ ID NO: 2392 - DNA, 658 bp, synthetic construct
  misc_feature 1..658: note = Synthetic polynucleotide encoding artificial human antibody VH chain
  source 1..658: mol_type = other DNA
gtgtgaggtgcagctggtggagtctgggggaggcttggtacagcctggggggtccctgagactctcctgtgcagcctctggattcaccttcagtagctatagcatgaactgggtccgccaggctccagggaaggggctggagtgggtttcatacattagtagtagtagtagtaccatatactacgcagactctgtgaagggccgattcaccatctccagagacaatgccaagaactcactgtatctgcaaatgaacagcctgagagccgaggacacggctgtgtattactgtgcgagagatatcgcgctgggacggggcggtatggacgtctggggccaagggaccacggtcaccgtctcctcagggagtgcatccggcccatcggtcttccccctggcaccctcctccaagagcacctctgggggcacagcggccctgggctgcctggtcaaggactacttccccgaaccggtgacggtgtcgtggaactcaggcgccctgaccagcggcgtgcacaccttcccggctgtcctacagtcctcaggactctactccctcagcagcgtggtgaccgtgccctccagcagcttgggcacccagacctacatctgcaacgtgaatcacaagcccagcaacaccaaggtggacaagaatgtg

SEQ ID NO: 2393 - DNA, 361 bp, synthetic construct
  misc_feature 1..361: note = Synthetic polynucleotide encoding artificial human antibody VH chain
  source 1..361: mol_type = other DNA
cagctgcaactgcaggagtcgggcccaggactggtgaagccttcggagaccctgtccctcacctgcactgtctctggtgtctccatcggcaccagtagttactattggggctggatccgccagccccctgcgaagggtctggagtggattgggagtatctactatagtgggagcacctactacaacccgtccctcaagaatcgagtcaccatatcagtagacacgtccaagaaccacttctccctgaagctgagctctgtgaccgccgcagacacggctgtgtattactgtgcgagacatagaacgggccaatattactataatagttggggccagggaaccctggtcaccgtctcctcag

SEQ ID NO: 2394 - DNA, 354 bp, synthetic construct
  misc_feature 1..354: note = Synthetic polynucleotide encoding artificial human antibody VH chain
  source 1..354: mol_type = other DNA
cccaggtgcagctgcaggagtcgggcccaggactggtgaagccttcggagaccctgtcactcacctgctctgtctctggtgactccttcagtgattactactggagctggacccgtcagtccccagggaagggactagagtggcttggttatatgttttatggtgggagcaccaactacaacccctccctcaagagtcgactcaccatgtcagtagacacgtccaagaaacacgtctacctgaagttgagctctgtgaccgctgcggacacggccgtgtattattgtgcggcgtccggctacggtgaccacgtggcctactggggccagggaaccctagtcaccgtctcctccg

SEQ ID NO: 2395 - DNA, 663 bp, synthetic construct
  misc_feature 1..663: note = Synthetic polynucleotide encoding artificial human antibody VH chain
  source 1..663: mol_type = other DNA
caggtgcagctggtggagtctgggggaggcgtagtccagcctgggaggtccctgagactctcctgtgtagcgtctggattcaccttcagtaattatgccatgcactgggtccgccaggctccaggcaaggggctggagtgggtggcagttatatggtatgatggaagtaatgaatactatagagactccgtggagggccgattcaccatctccagagacagttccaagaatactctgtatctgctagtgaacagcctgagagccgaggacacggctgtctattattgtgcgagagggaatggacctaagagtgggaagtactcggactttgactactggggccagggaaccctggtcaccgtctcctcagcctccaccaagggcccatcggtcttccccctggcaccctcctccaagagcacctctgggggcacagcggccctgggctgcctggtcaaggactacttccccgaaccggtgacggtgtcgtggaactcaggcgccctgaccagcggcgtgcacaccttcccggctgtcctacagtcctcaggactctactccctcagcagcgtggtgaccgtgccctccagcagcttgggcacccagacctacatctgcaacgtgaatcacaagcccagcaacaccaaggtggacaagagtgag

SEQ ID NO: 2396 - DNA, 352 bp, synthetic construct
  misc_feature 1..352: note = Synthetic polynucleotide encoding artificial human antibody VH chain
  source 1..352: mol_type = other DNA
caggttcagctggtgcaatctggaactgaggtgaagaagcctggggcctcagtgaaggtctcctgcaaggcttctggttacagatttaccagcaatggtatcagttgggtgcgacaggctcctggacaagggcttcagtggatgggatggatcagcactgacagtggtaacacaaattacgcacagagcttccagggcagagtcaccttgaccagagacacatccacgaacacagcctatctggaactcaggagactaagatctgaggacacggccgtgtattattgtgcgagagataagtcctggtactttgactactggggccagggaaccctggtcagcgtctcctcag

SEQ ID NO: 2397 - DNA, 664 bp, synthetic construct
  misc_feature 1..664: note = Synthetic polynucleotide encoding artificial human antibody VH chain
  source 1..664: mol_type = other DNA
gtgtgaggtgcagctggtggagtctgggggaggtgtggtacggcctggggggtccctgagactctcctgtgcagcctctggattcacctttgatgattatggcatgagctgggtccgccaagctccagggaaggggctggagtgggtctctggtattcattggaatggtggtagcacaggttatgcagactctgtgaagggccgattcaccatctccagagacaacgccaagaactccctgtatctgcaaatgaacagtctgagagccgaggacacggccttgtatcactgtgcgagatccaccgctagtagtggttattatgatgcttttgatatctggggccaagggacaatggtcaccgtctcttcagcctccaccaagggcccatcggtcttccccctggcaccctcctccaagagcacctctgggggcacagcggccctgggctgcctggtcaaggactacttccccgaaccggtgacggtgtcgtggaactcaggcgccctgaccagcggcgtgcacaccttcccggctgtcctacagtcctcaggactctactccctcagcagcgtggtgaccgtgccctccagcagcttgggcacccagacctacatctgcaacgtgaatcacaagcccagcaacaccaaggtggacaagagtgag

SEQ ID NO: 2398 - DNA, 681 bp, synthetic construct
  misc_feature 1..681: note = Synthetic polynucleotide encoding artificial human antibody VH chain
  source 1..681: mol_type = other DNA
caggtgcagctggtggagtctgggggaggcgtggtccagcctgggaggtccctgagactctcctgtgcagcgtctggattcagtttcagtgcctatggcatgcactgggtccgccaggctccaggcaaggggctggagtgggtggcaattatgtggtatgatggaaataataaatactatgcagactccgtgaagggccgattcaccatctccagagacaattccaagaacacgctatatctgcaaatgaacagcctgagagccgaggacacggctgtgtattactgtgcgagagatcgtcgagagtatagcagctcgtcccggccttcatatcactactactacatggacgtctggggcaaagggaccacggtcaccgtctcctcagcctccaccaagggcccatcggtcttccccctggcaccctcctccaagagcacctctgggggcacagcggccctgggctgcctggtcaaggactacttccccgaaccggtgacggtgtcgtggaactcaggcgccctgaccagcggcgtgcacaccttcccggctgtcctacagtcctcaggactctactccctcagcagcgtggtgaccgtgccctccagcagcttgggcacccagacctacatctgcaacgtgaatcacaagcccagcaacaccaaggtggacaagagtgag

SEQ ID NO: 2399 - DNA, 654 bp, synthetic construct
  misc_feature 1..654: note = Synthetic polynucleotide encoding artificial human antibody VH chain
  source 1..654: mol_type = other DNA
gtggtgcagctgttggagtctgggggaggcttggtacaccctggggggtccctgagaatttcctgtgcagcctctgaattcacctttagcgcctatgccatgacctgggtccgccaggctccagggaaggggctggagtgggtctcggctattagtggcagtggtggtcggacatactacgcagactccctgaagggccggttcaccatctccagagacaattccaagcacactctgtatctcctaatgaatagtctgagagtcgaggacacggccgtttattactgtgcgtcccgatatagaagcccgtccggtgcttttgacatctggggccaagggacattggtcaccgtctcttcagcctccaccaagggcccatcggtcttccccctggcaccctcctccaagagcacctctgggggcacagcggccctgggctgcctggtcaaggactacttccccgaaccggtgacggtgtcgtggaactcaggcgccctgaccagcggcgtgcacaccttcccggctgtcctacagtcctcaggactctactccctcagcagcgtggtgaccgtgccctccagcagcttgggcacccagacctacatctgcaacgtgaatcacaagcccagcaacaccaaggtggacaagagagtc

SEQ ID NO: 2400 - DNA, 645 bp, synthetic construct
  misc_feature 1..645: note = Synthetic polynucleotide encoding artificial human antibody VH chain
  source 1..645: mol_type = other DNA
gaggtgcagctggtggagtctgggggaggcttggtaaagcctggggggtcccttagactctcctgtgcagcctctggtttcactttcagtaacgcctggatgaactgggtccgccagactccagggaaggggctggagtgggtcggccgtattaaaaccaaaactgatggtgggacaacagactacgctgaacccgtaaaaggcagattcaccatctcaagagatgattcaaaaaacacgctatatctgcaaatgaacagcctgaaaaccgaggacacagccgtgtattattgtaccagaggagcagtggccgactactggggccagggaacccaggtcaccgtctcctcagcctccaccaagggcccatcggtcttccccctggcaccctcctccaagagcacctctgggggcacagcggccctgggctgcctggtcaaggactacttccccgaaccggtgacggtgtcgtggaactcaggcgccctgaccagcggcgtgcacaccttcccggctgtcctacagtcctcaggactctactccctcagcagcgtggtgaccgtgccctccagcagcttgggcacccagacctacatctgcaacgtgaatcacaagcccagcaacaccaaggtggacaagagagtc

SEQ ID NO: 2401 - DNA, 657 bp, synthetic construct
  misc_feature 1..657: note = Synthetic polynucleotide encoding artificial human antibody VH chain
  source 1..657: mol_type = other DNA
caggtgcagctgaagcagtcggggggaggcgtggtccagcctgggaggtccctgacactctcctgtgtagcgtctggactcaccttcagtgactatggcatgcactgggtccgccaggctccaggcaaggggctggagtgggtggccgttatttggcatgatggcagtaagacgaattatgcagactccgtgaagggccgaatcatcatctccagagacaactccaagagcacggtgtatttgcaaatgaacagattgagaggcgaggacacggctgtgtattactgtgcgacctcccacggaggactagtgcctggcggcgaaaactactggggccagggaaccctggtcaccgtctcctcagcctccaccaagggcccatcggtcttccccctggcaccctcctccaagagcacctctgggggcacagcggccctgggctgcctggtcaaggactacttccccgaaccggtgacggtgtcgtggaactcaggcgccctgaccagcggcgtgcacaccttcccggctgtcctacagtcctcaggactctactccctcagcagcgtggtgaccgtgccctccagcagcttgggcacccagacctacatctgcaacgtgaatcacaagcccagcaacaccaaggtggacaagagagtc

SEQ ID NO: 2402 - DNA, 370 bp, synthetic construct
  misc_feature 1..370: note = Synthetic polynucleotide encoding artificial human antibody VH chain
  source 1..370: mol_type = other DNA
caggttcagctggtgcagtcgggatctgagttgaagaagcctggggcctcagtgaaggtctcctgcacaagttccggttacgtctttaccagctttggggtcagctgggtgcgacaggtcccgggacaagggcctgagtggatgggatggattagcccttacacccgtcagacaaaatatgcacagagtctccagggcagaatcaccctgaccgcagacacatccacaaatacgacttacatggaactgaggagcctgagatctgacgacacggccatgtattactgtgtgagagaggagtttggagtggttcgtggacctaatccctttgatgtctggggccaggggacaatggtcaccgtctcttcag

SEQ ID NO: 2403 - DNA, 672 bp, synthetic construct
  misc_feature 1..672: note = Synthetic polynucleotide encoding artificial human antibody VH chain
  source 1..672: mol_type = other DNA
gaggtgcagctggtggagtcggggggaggcgtggtccagcctggggggtccctgagactctcctgtgcagcgtctggattcaccttcgaagacttcggcatgcactgggtccgccaggctccaggcaaggggctggagtgggtggcatttacacgttttgatggaagtgaaaaatattatgtcgactccgtgaagggccgattcaccgtctccagagacaattccaagaatacactttttctacatatgaacagcctgagaccggaagacacggctgtatattactgtgcgaaaacccgttcttatagttccgctgacactactcgtcccaatgccccgggctactggggccagggaaccctggtcaccgtctcctcagcctccaccaagggcccatcggtcttccccctggcaccctcctccaagagcacctctgggggcacagcggccctgggctgcctggtcaaggactacttccccgaaccggtgacggtgtcgtggaactcaggcgccctgaccagcggcgtgcacaccttcccggctgtcctacagtcctcaggactctactccctcagcagcgtggtgaccgtgccctccagcagcttgggcacccagacctacatctgcaacgtgaatcacaagcccagcaacaccaaggtggacaagagagtc

SEQ ID NO: 2404 - DNA, 660 bp, synthetic construct
  misc_feature 1..660: note = Synthetic polynucleotide encoding artificial human antibody VH chain
  source 1..660: mol_type = other DNA
caggtgcagctggtggaatctgggggaggcgtggtccagcctgggaggtccctgagactctcctgtgcagcctctggattcaccctcagtacctatggcatgcactgggtccgccaggctccaggcaaggggctggagtgggtggcagttatatcacatgatggaagtaataactactatgcagactacgtgaagggccgattcaccatctccagagacaattccaagaacacgctgtacctgcaaatgaacagcctgagaattgaggacacggctgtgtattactgtgcgaaagatggccaaactggaactacaaccccatactttgactactggggccagggaaccctggtcaccgtctcctcagcctccaccaagggcccatcggtcttccccctggcgccctgctccaggagcacctccgagagcacagcggccctgggctgcctggtcaaggactacttccccgaaccggtgacggtgtcgtggaactcaggcgctctgaccagcggcgtgcacaccttcccggctgtcctacagtcctcaggactctactccctcagcagcgtggtgaccgtgacctccagcaacttcggcacccagacctacacctgcaacgtagatcacaagcccagcaacaccaaggtggacaagacagtg

SEQ ID NO: 2405 - DNA, 657 bp, synthetic construct
  misc_feature 1..657: note = Synthetic polynucleotide encoding artificial human antibody VH chain
  source 1..657: mol_type = other DNA
cccgtccagcttgtgcagtctggggcccaggtgaagaagcctggggcctcagtgaggctttcctgcaagtcttctggatataccttcagtaactatgctatacattggctgcgccaggcccccggacagaggcttgagtgggtggggtggatccacgttggaaatgatcacacaagatattcacagagtttccagggcagagtcaccatttccgcagatacatccgcgaacacggcctacatggaggtgagaggcctgcgatctgaagacacgtctctgttttactgtgcgagagccggggctgagggcgttgactattggggccagggaacccaggtgaccgtctcctcagcatccccgaccagccccaaggtcttcccgctgagcctctgcagcacccagccagatgggaacgtggtcatcgcctgcctggtccagggcttcttcccccaggagccactcagtgtgacctggagcgaaagcggacagggcgtgaccgccagaaacttcccacccagccaggatgcctccggggacctgtacaccacgagcagccagctgaccctgccggccacacagtgcctagccggcaagtccgtgacatgccacgtgaagcactacacgaatcccagccaggatgtgactgtgccctgccca

SEQ ID NO: 2406 - DNA, 657 bp, synthetic construct
  misc_feature 1..657: note = Synthetic polynucleotide encoding artificial human antibody VH chain
  source 1..657: mol_type = other DNA
gcagtgcagctggtgcagtctggagcagaggtgaaaaagcccggggagtctctgaggatctcctgtaagggttctggatacagcttttccacctactggatcatctgggtgcgccagatgcccgggaaaggcctagagtggattgggaggtttgatcctagtgactcttataacgtcaacagcccgtccttccaaggccacgtcaccatctcagctgacacgtccatcaacactgcctacttgcagtggagcagcctgaaggcctcggacagcgccatgtattactgtgcgagacgatccgataaagcagtgcctgggacctttgaccagtggggccagggaaccctggtcaccgtctcctcagcctccaccaagggcccatcggtcttccccctggcgccctgctccaggagcacctccgagagcacagcggccctgggctgcctggtcaaggactacttccccgaaccggtgacggtgtcgtggaactcaggcgctctgaccagcggcgtgcacaccttcccggctgtcctacagtcctcaggactctactccctcagcagcgtggtgaccgtgccctccagcaacttcggcacccagacctacacctgcaacgtagatcacaagcccagcaacaccaaggtggacaagacagtg

SEQ ID NO: 2407 - DNA, 663 bp, synthetic construct
  misc_feature 1..663: note = Synthetic polynucleotide encoding artificial human antibody VH chain
  source 1..663: mol_type = other DNA
cagatcaccctgaaggagtctggtcctacgctgctgaaacccacacagaccctcacgctgacctgcaacttctctgggttctcactcaccacatatggagtgggtgtggcctggatccgtcagcccccaggaaaggccctggagtggcttgcactcatttattgggatgatgataagcgctacagcccatctctgaagagcagactcaccgtcaccaaggacacctccaaaaaccaggtggtccttacaatgaccaacatggaccctgtggacacagccacatattactgtgcacacagggggggaaagaaccctcgttattggtacttcgatctctggggccgcggcactctggtcactgtctcctcagcctccaccaagggcccatcggtcttccccctggcaccctcctccaagagcacctctgggggcacagcggccctgggctgcctggtcaaggactacttccccgaaccggtgacggtgtcgtggaactcaggcgccctgaccagcggcgtgcacaccttcccggctgtcctacagtcctcaggactctactccctcagcagcgtggtgaccgtgccctccagcagcttgggcacccagacctacatctgcaacgtgaatcacaagcccagcaacaccaaggtggacaagaaagtg

SEQ ID NO: 2408 - DNA, 654 bp, synthetic construct
  misc_feature 1..654: note = Synthetic polynucleotide encoding artificial human antibody VH chain
  source 1..654: mol_type = other DNA
gaggtacagctggtggagtctggtggaggcctggtcaagcctagggggtccctgagactctcctgtgcagcctctggattcaccttcagtgcttatggcatgaactgggttcgccaggctccagggaagggactggagtgggtctcatccattagtggagatagtcgtgacatctactatggagcctctatgaagggccgattcaccatctccagagacaacgccaagagctcactgtatctgcaaatgaacagcctgagagccgaggacacggctgtttattactgtgcgagaggggaggggggggaattatgggcctttgactactggggcctgggagtcctggtcaccgtctcctcagcctccaccaagggcccatcggtcttccccctggcaccctcctccaagagcacctctgggggcacagcggccctgggctgcctggtcaaggactacttccccgaaccggtgacggtgtcgtggaactcaggcgccctgaccagcggcgtgcacaccttcccggctgtcctacagtcctcaggactctactccctcagcagcgtggtgaccgtgccctccagcagcttgggcacccagacctacatctgcaacgtgaatcacaagcccagcaacaccaaggtggacaagaaagcc

SEQ ID NO: 2409 - DNA, 657 bp, synthetic construct
  misc_feature 1..657: note = Synthetic polynucleotide encoding artificial human antibody VH chain
  source 1..657: mol_type = other DNA
cccgtgcagctggtgcagtctggggctgaggtgaagaagcctgggtcctcggtgcaggtctcctgcaagggttctggaggcaccttcagcgaatatggtatcagctggttgcgacaggcccctggacaagggcttgagtggattggaggaatcatacctgtcctaggtataccaaattacgcacaaaaattccggggcagagtcaccattaccgcggacgaatccacgggctcagcctacatggaggtgagcagcctcagatctgaagacacggccgtttattactgtgcgagagaggggcttcgtctggcacgtggctggtttcacccctggggccagggaaccctcgtcaccgtcacctcagcctccaccaagggcccatcggtcttccccctggcaccctcctccaagagcacctctgggggcacagcggccctgggctgcctggtcaaggactacttccccgaaccggtgacggtgtcgtggaactcaggcgccctgaccagcggcgtgcacaccttcccggctgtcctacagtcctcaggactctactccctcagcagcgtggtgaccgtgccctccagcagcttgggcacccagacctacatctgcaacgtgaatcacaagcccagcaacaccaaggtggacaagagtgag

SEQ ID NO: 2410 - DNA, 361 bp, synthetic construct
  misc_feature 1..361: note = Synthetic polynucleotide encoding artificial human antibody VH chain
  source 1..361: mol_type = other DNA
caggtgcaactgcaagagtcgggcccaggactggtgaagccttcggagaccctgtccctcatctgcactgtctctggtgcctccgtcaacagtgggactcacttctggagctggatccggcagcccccagggaagggactggagtggattggctatgtctattacagtgggaacaccaattacaatccctccctcaagagccgagtcgccatatcagttgacacgtccaagaaccagttctccctgaagctgacctctgtgacctctgcggacacggccgtgtattactgtgcgagagattttgatgatggctacgacatccgttactggggccagggaacccgggtcagcgtctcctcag

SEQ ID NO: 2411 - DNA, 654 bp, synthetic construct
  misc_feature 1..654: note = Synthetic polynucleotide encoding artificial human antibody VH chain
  source 1..654: mol_type = other DNA
gtggtgcagctggtggagtctgggggaggcttggtccagcctggggggtccctgagactctcctgttcagcctctggattcaccttcagtagctatgctatgcactgggtccgccaggctccagggaagggactggaatatgtttcagctattagtagtaatgggggtagcacatactacgcagactccgtgaagggcagattcaccatctccagagacaattccaagaacacgctgtatcttcaaatgagcagtctgagagctgaggacacggctgtgtattactgtgtgaaatcaccagtggccgcaaatgatgcttttgatatctggggccaagggacaatggtcaccgtctcttcagcctccaccaagggcccatcggtcttccccctggcaccctcctccaagagcacctctgggggcacagcggccctgggctgcctggtcaaggactacttccccgaaccggtgacggtgtcgtggaactcaggcgccctgaccagcggcgtgcacaccttcccggctgtcctacagtcctcaggactctactccctcagcagcgtggtgaccgtgccctccagcagcttgggcacccagacctacatctgcaacgtgaatcacaagcccagcaacaccaaggtggacaagagtgtg

SEQ ID NO: 2412 - DNA, 658 bp, synthetic construct
  misc_feature 1..658: note = Synthetic polynucleotide encoding artificial human antibody VH chain
  source 1..658: mol_type = other DNA
gtgtgaggtgcagctggtggagtctgggggaggcttggtacagcctggggggtccctgagactctcctgtgtagcctctggattcaccttcagtagctatagcatgaactgggtccgccaggctccagggaaggggctgaagtgggtttcatacattagtagtagtaggagtaccatatacaacgcagactctgtgaagggccgattcaccatctccagagacaatgccaagaagtcactgtatctgcaaatgaacagcctgagagccgaggacacggctgtgtattactgtgcgagagtgtctgtggccgccccaacgtgcttggactactggggccagggaaccctggtcaccgtctcctcagcctccaccaagggcccatcggtcttccccctggcaccctcctccaagagcacctctgggggcacagcggccctgggctgcctggtcaaggactacttccccgaaccggtgacggtgtcgtggaactcaggcgccctgaccagcggcgtgcacaccttcccggctgtcctacagtcctcaggactctactccctcagcagcgtggtgaccgtgccctccagcagcttgggcacccagacctacatctgcaacgtgaatcacaagcccagcaacaccaaggtggacaagaaggtg

SEQ ID NO: 2413 - DNA, 663 bp, synthetic construct
  misc_feature 1..663: note = Synthetic polynucleotide encoding artificial human antibody VH chain
  source 1..663: mol_type = other DNA
cagctgcagctgcaggagtcgggcccaggactggtgaagccttcggagaccctgtccctcacctgcactgtcgctggtgactccatcagcaggagtaattactactgggcctggatccgccagcccccagggaaggggctggagtggattgggagtatcattcatactgggaccacctaccacaacccgtccctcaggagtcgcggcaccattttggtagacacgtccaagaaccaattctccctgaaactgagctctgtgaccgccgcagacacgggtctatattactgtgcgagacattcagggcacgatcagttgccgctagactttgacaactggggccagggaaccctggtcaccgtctcctcagcctccaccaagggcccatcggtcttccccctggcaccctcctccaagagcacctctgggggcacagcggccctgggctgcctggtcaaggactacttccccgaaccggtgacggtgtcgtggaactcaggcgccctgaccagcggcgtgcacaccttcccggctgtcctacagtcctcaggactctactccctcagcagcgtggtgaccgtgccctccagcagcttgggcacccagacctacatctgcaacgtgaatcacaagcccagcaacaccaaggtggacaagagtgag

SEQ ID NO: 2414 - DNA, 349 bp, synthetic construct
  misc_feature 1..349: note = Synthetic polynucleotide encoding artificial human antibody VH chain
  source 1..349: mol_type = other DNA
gaggtgcaactggttgagtccgggggaggcttagttcagccgggggggtccctgagactctcctgtgcagcctctggattcacctttagtaagttttggatgcactgggtccgccaagctccagggaaggggctggtgtggctctcacgtattaatactgatgggactgtcacaacctacgcggactccgtgaagggccggttcaccatctccagagacaacgccaagagcacgctgtatctgcaaatgaacagtctgagagtcgaggacacggctgtttattattgtgcaggaggaggaagtcaagtggacttctggggccagggaaccctggtcaccgtctcctcag

SEQ ID NO: 2415 - DNA, 671 bp, synthetic construct
  misc_feature 1..671: note = Synthetic polynucleotide encoding artificial human antibody VH chain
  source 1..671: mol_type = other DNA
cccagatcaccttgaaggagtctggtcctacgctggtgaaacccacacagaccctcacgctgacctgcaccttctctgggttctctctgaccactactggagtgggtgtgggctggatccgtcagcccccaggaaaggccctggagtggcttgcactcatttattgggatgatgataagcgctacagcccatctctgaagagcaggctcatcatcaccaaggacacctccaaaaaccaggtggtccttacaatgaccaacatggaccctgtggacacagccacatattactgtgcacacagattcgggagaggggtgtcctactactactacggtatggacgtctggggccaagggaccacggtcaccgtctcctcagcctccaccaagggcccatcggtcttccccctggcaccctcctccaagagcacctctgggggcacagcggccctgggctgcctggtcaaggactacttccccgaaccggtgacggtgtcgtggaactcaggcgccctgaccagcggcgtgcacaccttcccggctgtcctacagtcctcaggactctactccctcagcagcgtggtgaccgtgccctccagcagcttgggcacccagacctacatctgcaacgtgaatcacaagcccagcaacaccaaggtggacaagaaggtg

SEQ ID NO: 2416 - DNA, 651 bp, synthetic construct
  misc_feature 1..651: note = Synthetic polynucleotide encoding artificial human antibody VH chain
  source 1..651: mol_type = other DNA
caggtgcagctggtggagtctgggggaggcgtggtccagcctgggaggtccctgagactctcctgtgcagcctctggattcatcttcagtagctatggcatgcactgggtccgccaggctccaggcaaggggctggagtgggtggcagttatatcatatgatggaagtaataaatactatgcagactccgtgaagggccgattcaccatctccagagacaaatccaagaacacgctgcatctgcaaatgaacagcctgagagctgaggacacggctgtgtattactgtgcgaaagatagtgggagcaacgacgacatggacgtctggggcaaggggaccacggtcaccgtctcctcagcctccaccaagggcccatcggtcttccccctggcaccctcctccaagagcacctctgggggcacagcggccctgggctgcctggtcaaggactacttccccgaaccggtgacggtgtcgtggaactcaggcgccctgaccagcggcgtgcacaccttcccggctgtcctacagtcctcaggactctactccctcagcagcgtggtgaccgtgccctccagcagcttgggcacccagacctacatctgcaacgtgaatcacaagcccagcaacaccaaggtggacaagagtgag

SEQ ID NO: 2417 - DNA, 658 bp, synthetic construct
  misc_feature 1..658: note = Synthetic polynucleotide encoding artificial human antibody VH chain
  source 1..658: mol_type = other DNA
gtgtgaggtgcagctggtggagtctgggggaggcttggtacagcctggagggtccctgagactctcctgtgcagcctctggattcaccttcagtagttatgaaatgaactgggtccgccaggctccagggaaggggctggagtgggtttcatacattagtagtagtggtagtaccatatactacgcagactctgtgaagggccgattcaccatctccagagacaacgccaagaactcactgtatctgcaaatgaacagcctgagagccgaggacacggctgtttattactgtgcgagaagaggtttttactactactacggtatggacgtctggggccaagggaccacggtcaccgtctcctcagcctccaccaagggcccatcggtcttccccctggcaccctcctccaagagcacctctgggggcacagcggccctgggctgcctggtcaaggactacttccccgaaccggtgacggtgtcgtggaactcaggcgccctgaccagcggcgtgcacaccttcccggctgtcctacagtcctcaggactctactccctcagcagcgtggtgaccgtgccctccagcagcttgggcacccagacctacatctgcaacgtgaatcacaagcccagcaacaccaaggtggacaagagtgag

SEQ ID NO: 2418 - DNA, 649 bp, synthetic construct
  misc_feature 1..649: note = Synthetic polynucleotide encoding artificial human antibody VH chain
  source 1..649: mol_type = other DNA
gtgtgaggtgcagctggtggagtctgggggaggcttggtacagcctggggggtccctgagactctcctgtgcagcctctggattcaccttcagtagctatagcatgaactgggtccgccaggctccagggaaggggctggagtgggtttcatacattagtagtagtagtagtaccatatactacgcagactctgtgaagggccgattcaccatctccagagacaatgccaagaactcactgtatctgcaaatgaacagcctgagagccgaggacacggctgtgtattactgtgcgagtctcctcgggggcgatcctgactactggggccagggaaccctggtcaccgtctcctcagcctccaccaagggcccatcggtcttccccctggcaccctcctccaagagcacctctgggggcacagcggccctgggctgcctggtcaaggactacttccccgaaccggtgacggtgtcgtggaactcaggcgccctgaccagcggcgtgcacaccttcccggctgtcctacagtcctcaggactctactccctcagcagcgtggtgaccgtgccctccagcagcttgggcacccagacctacatctgcaacgtgaatcacaagcccagcaacaccaaggtggacaagaaggtg

SEQ ID NO: 2419 - DNA, 678 bp, synthetic construct
  misc_feature 1..678: note = Synthetic polynucleotide encoding artificial human antibody VH chain
  source 1..678: mol_type = other DNA
cccgtcaccttgagggagtctggtcctgcgctggtgaaacccacacagaccctcacactgacctgcaccttctctgggttctcactcagcactagtggaatgtgtgtgagctggatccgtcagcccccagggaaggccctggagtggcttgcacgcattgattgggatgatgataaatactacagcacatctctgaagaccaggctcaccatctccaaggacacctccaaaaaccaggtggtccttacaatgaccaacatggaccctgtggacacagccacgtattactgtgcacggatgcaaatagtggctacgacacagacctactactactactacggtatggacgtctggggccaagggaccacggtcaccgtctcctcagcctccaccaagggcccatcggtcttccccctggcaccctcctccaagagcacctctgggggcacagcggccctgggctgcctggtcaaggactacttccccgaaccggtgacggtgtcgtggaactcaggcgccctgaccagcggcgtgcacaccttcccggctgtcctacagtcctcaggactctactccctcagcagcgtggtgaccgtgccctccagcagcttgggcacccagacctacatctgcaacgtgaatcacaagcccagcaacaccaaggtggacaagagtgag

SEQ ID NO: 2420 - DNA, 654 bp, synthetic construct
  misc_feature 1..654: note = Synthetic polynucleotide encoding artificial human antibody VH chain
  source 1..654: mol_type = other DNA
gaggtgcagctggtggagtctgggggaggcttggtccagcctggggggtccctgagactctcctgtgcagcctctggattcacctttagtagctattggatgacctgggtccgccaggctccagggaaggggctggagtgggtggccaacataaagcaagatggaagtgagaaatactatgtggactctgtgaagggccgattcaccatctccagagacaattccaagaactcgctgtatctgcaaatgaacagcctgagagctgaggacacggctgtgtattactgtgcgagagcgggctacgatcttttcggctggttcgacccctggggccagggaaccctggtcaccgtctcctcagcctccaccaagggcccatcggtcttccccctggcaccctcctccaagagcacctctgggggcacagcggccctgggctgcctggtcaaggactacttccccgaaccggtgacggtgtcgtggaactcaggcgccctgaccagcggcgtgcacaccttcccggctgtcctacagtcctcaggactctactccctcagcagcgtggtgaccgtgccctccagcagcttgggcacccagacctacatctgcaacgtgaatcacaagcccagcaacaccaaggtggacaagaagttg

SEQ ID NO: 2421 - DNA, 376 bp, synthetic construct
  misc_feature 1..376: note = Synthetic polynucleotide encoding artificial human antibody VH chain
  source 1..376: mol_type = other DNA
gaggtgcagctgttggagtctgggggaggcttggtacagcctgggggatccctgagactctcctgtgtagcctctggattcacctttgccagctatggcatggcctgggtccgccaggctccagggcaggggctgacctggatctgttttgttggtagcggtgacaccacacactacgcggagtccgtgaagggccgcttcacctgttccagagacaactccaacaatacactttatctccatatgagcggtctgagaggcgcagacacggccaaatattactgtgcgaaacccaactcccctttcactggcagtggaagtttccacaactactttgactactggggccagggcgcgctggtcatcgtctcctcag

SEQ ID NO: 2422 - DNA, 342 bp, synthetic construct
  misc_feature 1..342: note = Synthetic polynucleotide encoding artificial human antibody VH chain
  source 1..342: mol_type = other DNA
gtgaggtgcaggtggtggagtctgggggaggcttgggacagcctggggggtccctgagactctcctgtgcagcctctggattcaccttcagtagctatagtatgaactgggtccgccaggctccagggaaggggctggagtgggtttcatacattagtagtagtagtagtaccaaatactacgcagactctgtgaagggccgattcaccatctccagagacaatgccaagaaatcactgtatctgcaaatgaacagcctgagagacgaggacacggctgtgtattactgtgcgagtcccgttcgaccctggggccagggaaccctggtcaccgtctcctcag

SEQ ID NO: 2423 - DNA, 678 bp, synthetic construct
  misc_feature 1..678: note = Synthetic polynucleotide encoding artificial human antibody VH chain
  source 1..678: mol_type = other DNA
caggtgcagctggtgcagtccggggctgagatgaagaagcctgggacctcagtgaaggtctcctgcaggacttctggatacatcttcaccggctcctttatgcactgggtgcgacaggcccctgcacaagggctcgagtggatgggatggatcaaccctaagactggtgccacatactatacagagaaatttaagggcagggtcaccctgaccagggacacgtccatcaacacagcctacatggagatgaccagcctgagatctgacgacacggccgtgtattattgtgcgagaggattttgtgatcttcccgcctgttatcccgtacctcaatacaactggttcgacccctggggccagggaaccctggtcaccgtctcctcagcctccaccaagggcccatcggtcttccccctggcaccctcctccaagagcacctctgggggcacagcggccctgggctgcctggtcaaggactacttccccgaaccggtgacggtgtcgtggaactcaggcgccctgaccagcggcgtgcacaccttcccggctgtcctacagtcctcaggactctactccctcagcagcgtggtgaccgtgccctccagcagcttgggcacccagacctacatctgcaacgtgaatcacaagcccagcaacaccaaggtggacaagagagtt

SEQ ID NO: 2424 - DNA, 657 bp, synthetic construct
  misc_feature 1..657: note = Synthetic polynucleotide encoding artificial human antibody VH chain
  source 1..657: mol_type = other DNA
cccgtgcagctgcaggagtcgggcccaggacttgtgaagccttcacagaccctgtccctcacctgcactgtctctggtggctccatcagcagtggtacttactactggagctggatccggcagcccgccgggaagggactggagtggattgggcgtatctatgccagtgggagcaccaactacaacccctccctcaagagtcgagtcaccatatcagtagacacgtccaagaaccagttctccctgaagctgacctctgtgaccgccgcagacacggccgtgtattactgtgcgcgatatagtgggagctaccctttgggctttgactactggggccagggaaccctggtcaccgtctcctcagcctccaccaagggcccatcggtcttccccctggcaccctcctccaagagcacctctgggggcacagcggccctgggctgcctggtcaaggactacttccccgaaccggtgacggtgtcgtggaactcaggcgccctgaccagcggcgtgcacaccttcccggctgtcctacagtcctcaggactctactccctcagcagcgtggtgaccgtgccctccagcagcttgggcacccagacctacatctgcaacgtgaatcacaagcccagcaacaccaaggtggacaagaaggtg

SEQ ID NO: 2425 - DNA, 650 bp, synthetic construct
  misc_feature 1..650: note = Synthetic polynucleotide encoding artificial human antibody VH chain
  source 1..650: mol_type = other DNA
gcggtgccgaggtgcagctggtgcagtctggagcagaggtgaaaaagccggggcagtctctgaagatctcctgtaagggttctggatacagctttaccaactactggatcggctgggtgcgccagatgcccgggaaaggcctggagtggatggggatcatctatcctggtgactctgataccagatacagcccgtccttccaaggccaggtcaccatctcagccgacaagtccatcagcaccgcctacctgcagtggagcagcctgaaggcctcggacaccgccatgtattactgtgcgagacatgaaggtgcttttgatatctggggccaagggacaatggtcaccgtctcttcagcctccaccaagggcccatcggtcttccccctggcaccctcctccaagagcacctctgggggcacagcggccctgggctgcctggtcaaggactacttccccgaaccggtgacggtgtcgtggaactcaggcgccctgaccagcggcgtgcacaccttcccggctgtcctacagtcctcaggactctactccctcagcagcgtggtgaccgtgccctccagcagcttgggcacccagacctacatctgcaacgtgaatcacaagcccagcaacaccaaggtggacaagaaggtg

SEQ ID NO: 2426 - DNA, 364 bp, synthetic construct
  misc_feature 1..364: note = Synthetic polynucleotide encoding artificial human antibody VH chain
  source 1..364: mol_type = other DNA
gtggtgcagctggtggagtctgggggaggcttggtaaagcctggggggtcccttagactctcctgtgcagcctctggattcactttcagtaacgcctggatgagctgggtccgccaggctccagggaaggggctggagtgggttggccgtattaaaagcaaaactgatggtgggacaacagactacactgcacccgtgaaaggcagattcaccatctcaagagatgattcaaaaaacacgctgtatctgcaaatgaacagcctgaaaaccgaggacacagccgtgtattactgtaccacagatcttgcggtgactacgcgatttgactactggggccagggaaccctggtcaccgtctcctcag

SEQ ID NO: 2427 - DNA, 648 bp, synthetic construct
  misc_feature 1..648: note = Synthetic polynucleotide encoding artificial human antibody VH chain
  source 1..648: mol_type = other DNA
caggtgcagctggtggagtctgggggaggcgtggtccagcctgggaggtccctgagactctcctgtgcagcctctggattccccttcagtacctatgctctgcactgggtccgccaggctccaggcaaggggctggagtgggtggcagtcatatcaaaagatggaaacagcaaatcttccgcagagtccgtgaagggccgattcaccatctccagagacaaatccaggaacacactttatctgcaaatgaacagcctgagacctgaagacacggctgtatattactgtgcgagaagcacacgtacagacgctttggacgtctggggccaagggaccacggtcaccgtctcctcagcctccaccaagggcccatcggtcttccccctggcaccctcctccaagagcacctctgggggcacagcggccctgggctgcctggtcaaggactacttccccgaaccggtgacggtgtcgtggaactcaggcgccctgaccagcggcgtgcacaccttcccggctgtcctacagtcctcaggactctactccctcagcagcgtggtgaccgtgccctccagcagcttgggcacccagacctacatctgcaacgtgaatcacaagcccagcaacaccaaggtggacaagagagtg

SEQ ID NO: 2428 - DNA, 660 bp, synthetic construct
  misc_feature 1..660: note = Synthetic polynucleotide encoding artificial human antibody VH chain
  source 1..660: mol_type = other DNA
gaggtgcagctggtggagtccgggggaggcttggtccagcctggggggtccttgaaactctcctgtgcagcctctggtttctccttcagtggctcttctgtgcactgggtccgccaggcttccgggaaagggctggagtgggttggccgtattagaagcaaaactaagaattacgcgacagcatatgctgcgtcggtgaaaggcaggttcaccatctccagagatgattcaaagaacacggcgtttctgcaaatgcgcagcctgaaagccgaggacacggccgtatattactgtgctaaaaatgacgagatggactttaagggctatgactactggggccagggaaccctggtcaccgtctcctcagcctccaccaagggcccatcggtcttccccctggcaccctcctccaagagcacctctgggggcacagcggccctgggctgcctggtcaaggactacttccccgaaccggtgacggtgtcgtggaactcaggcgccctgaccagcggcgtgcacaccttcccggctgtcctacagtcctcaggactctactccctcagcagcgtggtgaccgtgccctccagcagcttgggcacccagacctacatctgcaacgtgaatcacaagcccagcaacaccaaggtggacaagaaggtg

SEQ ID NO: 2429 - DNA, 641 bp, synthetic construct
  misc_feature 1..641: note = Synthetic polynucleotide encoding artificial human antibody VH chain
  source 1..641: mol_type = other DNA
cccaggtgcagctgcaggagtcgggcccaggactggtgaagccttcggagaccctgtccctcacctgcactgtctctggtggctccatcagtagttattactggagctggatccggcagcccgccgggaagggactggagtggattgggcgtatctacaccagtgggagcaccaactacaacccctccctcaagagtcgagtcaccatgtcagtagacacgtccaagaaccagttctcgctgaagatgagctctgtgaccgccgcggacacggccgtgtattactgtgcgagaggggagttattattcgaccactggggccagggaacgctggtcaccgtctcctcagcctccaccaagggcccatcggtcttccccctggcaccctcctccaagagcacctctgggggcacagcggccctgggctgcctggtcaaggactacttccccgaaccggtgacggtgtcgtggaactcaggcgccctgaccagcggcgtgcacaccttcccggctgtcctacagtcctcaggactctactccctcagcagcgtggtgaccgtgccctccagcagcttgggcacccagacctacatctgcaacgtgaatcacaagcccagcaacaccaaggtggacaagaatgtg

SEQ ID NO: 2430 - DNA, 651 bp, synthetic construct
  misc_feature 1..651: note = Synthetic polynucleotide encoding artificial human antibody VH chain
  source 1..651: mol_type = other DNA
gaggtgcagctggtggagtctgggggaggcttggtgcagccagggcggtccctgagactctcctgtgtagcttctggattcacctttggtgattatgctgtgaactggttccgccaggctccagggaagggcctggaatgggttggtttcattagtaccaaaggttatgatgagacagcagaatatgccgcgtctgtgaagggcagatttaccatgtcaagagatgactccaaaaacatcgcctatctgctgatggacagcctgaaagccgaggacacagccatgtattattgtgctagagaatctacggtggttcttgacttctggggccaggggaccctggtcgccgtctcctcagcctccaccaagggcccatcggtcttccccctggcaccctcctccaagagcacctctgggggcacagcggccctgggctgcctggtcaaggactacttccccgaaccggtgacggtgtcgtggaactcaggcgccctgaccagcggcgtgcacaccttcccggctgtcctacagtcctcaggactctactccctcagcagcgtggtgaccgtgccctccagcagcttgggcacccagacctacatctgcaacgtgaatcacaagcccagcaacaccaaggtggacaagaaagtg

SEQ ID NO: 2431 - DNA, 651 bp, synthetic construct
  misc_feature 1..651: note = Synthetic polynucleotide encoding artificial human antibody VH chain
  source 1..651: mol_type = other DNA
caggtgcagctggtggactctgggggaggcgtggtccagccgggggggtccctgagactctcctgtgcagcgtcgggattcaccctcagtaactatggcatgaactgggtccgccaggctccaggcaaggggctggagtgggtggcatttataccgtatgatggaagtaataaatactacgcagactccgtgaagggccgattcaccatctccagagacatttccaagaacacactgtatctgcaaatgaacagcctgagaactgaggacacggctgtgtattactgtgcgaaaaggtcaacagcagtgggggacttcgacccctggggccagggaaccctggtcaccgtctcctcagcctccaccaagggcccatcggtcttccccctggcaccctcctccaagagcacctctgggggcacagcggccctgggctgcctggtcaaggactacttccccgaaccggtgacggtgtcgtggaactcaggcgccctgaccagcggcgtgcacaccttcccggctgtcctacagtcctcaggactctactccctcagcagcgtggtgaccgtgccctccagcagcttgggcacccagacctacatctgcaacgtgaatcacaagcccagcaacaccaaggtggacaagaaggtg

SEQ ID NO: 2432 - DNA, 675 bp, synthetic construct
  misc_feature 1..675: note = Synthetic polynucleotide encoding artificial human antibody VH chain
  source 1..675: mol_type = other DNA
gaggtgcagctggtggagtctgggggaggcttggtacagccgggggggtccctgagactctcctgtgcagcctctggattcagcatcactacccatagcatgaactgggtccgccaggctccagggaaggggctgcagtgggttgcatacatcagtactagtacaagtaccatatactacgcagactctgtggagggccgattcaccatctcgagagacaaggccaagaacgcactgtatctacaaatggacagcctgagagcccaggacacggctgtatattactgtgcgcgggggccgtccaactggaacgggggtccggagcacatggacgtctggggcaaagggaccacggtcaccgtctcctcagcatccccgaccagccccaaggtcttcccgctgagcctcgacagcaccccccaagatgggaacgtggtcgtcgcatgcctggtccagggcttcttcccccaggagccactcagtgtgacctggagcgaaagcggacagaacgtgaccgccagaaacttcccacctagccaggatgcctccggggacctgtacaccacgagcagccagctgaccctgccggccacacagtgcccagacggcaagtccgtgacatgccacgtgaagcactacacgaatcccagccaggatgtgactgtgccctgccca

SEQ ID NO: 2433 - DNA, 633 bp, synthetic construct
  misc_feature 1..633: note = Synthetic polynucleotide encoding artificial human antibody VH chain
  source 1..633: mol_type = other DNA
gtggtgcagctggtggagtctgggggaggcttggtacagcctggagggtccctgagactctcctgtgcagcctctggattcaccttcagtagttatgagatgaactgggtccgccaggctccagggaaggggctggagtgggtttcatacattagtagtagtggtagtaccatatactacgcagactctgtgaagggccgattcaccatctccagagacaacgccaagaactcactgtatctgcaaatgaacagcctgagagccgaggacacggctgtttattactgtgcgagagattttgactactggggccagggaaccctggtcaccgtctcctcagcctccaccaagggcccatcggtcttccccctggcaccctcctccaagagcacctctgggggcacagcggccctgggctgcctggtcaaggactacttccccgaaccggtgacggtgtcgtggaactcaggcgccctgaccagcggcgtgcacaccttcccggctgtcctacagtcctcaggactctactccctcagcagcgtggtgaccgtgccctccagcagcttgggcacccagacctacatctgcaacgtgaatcacaagcccagcaacaccaaggtggacaagaatgtg

SEQ ID NO: 2434 - DNA, 657 bp, synthetic construct
  misc_feature 1..657: note = Synthetic polynucleotide encoding artificial human antibody VH chain
  source 1..657: mol_type = other DNA
gtggtgcagctggtggagtctgggggaggcttggtacagcctggggggtccctgagactctcctgtgcagcctctggattcaccttcagtagctatagcatgaactgggtccgccaggctccagggaaggggctggagtgggtttcatacattagtagtagtagtagtaccatatactacgcagactctgtgaagggccgattcaccatctccagagacaatgccaagaactcactgtatctgcaaatgaacagcctgagagacgaggacacggctgtgtattactgtgcgagagatccctatggttcggggacggtctggttcgacccctggggccagggaaccctggtcaccgtctcctcagcctccaccaagggcccatcggtcttccccctggcaccctcctccaagagcacctctgggggcacagcggccctgggctgcctggtcaaggactacttccccgaaccggtgacggtgtcgtggaactcaggcgccctgaccagcggcgtgcacaccttcccggctgtcctacagtcctcaggactctactccctcagcagcgtggtgaccgtgccctccagcagcttgggcacccagacctacatctgcaacgtgaatcacaagcccagcaacaccaaggtggacaagaatgtg

SEQ ID NO: 2435 - DNA, 672 bp, synthetic construct
  misc_feature 1..672: note = Synthetic polynucleotide encoding artificial human antibody VH chain
  source 1..672: mol_type = other DNA
gaggcacagttggtggagtctggaggaggcttgatccagccgggggggtccctgagactctcctgtgcagcctctgggttcagcgtcagtagcaagtacatgagctgggtccgccaggctccagggaaggggctggagtgggtctcagttatgtacagtggtggcgccacatactacgcagattccgtgaagggccgattcgtcatctccagagacagttccaagaacacggtatttcttcaaatgaacagcctgagagccgaggacacggccgtttattactgtgcgaaaactgagtacacttttttgagtggctccgactactaccagtacggtatggacgtctggggccaagggacaacggtcaccgtctcctcagcctccaccaagggcccatcggtcttccccctggcaccctcctccaagagcacctctgggggcacagcggccctgggctgcctggtcaaggactacttccccgaaccggtgacggtgtcgtggaactcaggcgccctgaccagcggcgtgcacaccttcccggctgtcctacagtcctcaggactctactccctcagcagcgtggtgaccgtgccctccagcagcttgggcacccagacctacatctgcaacgtgaatcacaagcccagcaacaccaaggtggacaagagagtg

SEQ ID NO: 2436 - DNA, 663 bp, synthetic construct
  misc_feature 1..663: note = Synthetic polynucleotide encoding artificial human antibody VH chain
  source 1..663: mol_type = other DNA
ccggtgcagctggtgcagtctggagcagaggtgaaaaagccgggggagtctctgaagatctcctgtaagggttctggatacagctttaccaactactggatcggctgggtgcgccagatgcccgggaaaggcctggagtggatggggatcatctatcctggtgactctgataccagatacagcccgtccttccaaggccaggtcaccatctcagccgacaagtccatcagcaccgcctaccttcagtggagcagcctgaaggcctcggacaccgccatgtattactgtgcgagacgggggttattgcgtgggagcaacgagggaaggtttgactactggggccagggaaccctggtcaccgtctcctcagcctccaccaagggcccatcggtcttccccctggcaccctcctccaagagcacctctgggggcacagcagccctgggctgcctggtcaaggactacttccccgaaccggtgacggtgtcgtggaactcaggcgccctgaccagcggcgtgcacaccttcccggctgtcctacagtcctcaggactctactccctcagcagcgtggtgaccgtgccctccagcagcttgggcacccagacctacatctgcaacgtgaatcacaagcccagcaacaccaaggtggacaagaaggtg

SEQ ID NO: 2437 - DNA, 666 bp, synthetic construct
  misc_feature 1..666: note = Synthetic polynucleotide encoding artificial human antibody VH chain
  source 1..666: mol_type = other DNA
gtggtgcagctggtggagtccgggggagacttggtccagcctggggggtccctgaaactctcctgtgcagcctctgggttcaccttcagtggctctgctatgcactgggtccgccaggcttccgggaaagggctggagtgggttggccgtattagaagtaaacctaacagttacgcgacagcatatgctgtgtcggtgaaaggcaggttcaccatctccagagatgattcaaagaacacggcgtatctgcaaatgaacagcctgaaaaccgaggacacggccgtatattattgtactagacgcggcagtgcctggacggacccctactacacggacgtctggggcaaagggaccacggtcaccgtctcctcagcctccaccaagggcccatcggtcttccccctggcaccctcctccaagagcacctctgggggcacagcggccctgggctgcctggtcaaggactacttccccgaaccggtgacggtgtcgtggaactcaggcgccctgaccagcggcgtgcacaccttcccggctgtcctacagtcctcaggactctactccctcagcagcgtggtgaccgtgccctccagcagcttgggcacccagacctacatctgcaacgtgaatcacaagcccagcaacaccaaggtggacaagagagag

SEQ ID NO: 2438 - DNA, 666 bp, synthetic construct
  misc_feature 1..666: note = Synthetic polynucleotide encoding artificial human antibody VH chain
  source 1..666: mol_type = other DNA
tcggtgcagctggtggagtctgggggaggcgtggtccagcctgggaggtccctgagactctcctgtgcagcgtctggattcaccttcagtgactatggcatgcactgggtccgccaggctccaggcaaggggctggagtgggtggcagttatatggtatgatggaagtaatgagtactatgcagactccgtgaagggccgattcaccatctccagagacaattccaagaacacggtttatctgcaaatgaacagcctaggagccgaggacacggctgtatattactgtgcgagagatgatgtccctaggggttatgactactggggccagggaaccctggtcaccgtctcctcagggagtgcatccgccccaacccttttccccctcgtctcctgtgagaattccccgtcggatacgagcagcgtggccgttggctgcctcgcacaggacttccttcccgactccatcactttctcctggaaatacaagaacaactctgacatcagcagcacccggggcttcccatcagtcctgagagggggcaagtacgcagccacctcacaggtgctgctgccttccaaggacgtcatgcagggcacagacgaacacgtggtgtgcaaagtccagcaccccaacggcaacaaagaaaagaacgtgcctcttcca

SEQ ID NO: 2439 - DNA, 654 bp, synthetic construct
  misc_feature 1..654: note = Synthetic polynucleotide encoding artificial human antibody VH chain
  source 1..654: mol_type = other DNA
tcagtgcagctggtggagtctgggggaggcgtggtccagcctgggaggtccctgagactctcctgtgcagcgtctggatacaccttcaataactatggcatgcactgggtccgccaggctccaggcaaggggctggagtgggtggcaattatatggtatgatggaagtaataaatactatgcagactccgtgaagggccgattcaccatctccagagacaattccaagaacacgctgtatctgcaaatgaacagcctgagagccgaggacacggctgtgtattactgtgcgagagagtacattgtacccttctacggtatggacgtctggggccaagggaccacggtcaccgtctcctcagcctccaccaagggcccatcggtcttccccctggcaccctcctccaagagcacctctgggggcacagcggccctgggctgcctggtcaaggactacttccccgaaccggtgacggtgtcgtggaactcaggcgccctgaccagcggcgtgcacaccttcccggctgtcctacagtcctcaggactctactccctcagcagcgtggtgaccgtgccctccagcagcttgggcacccagacctacatctgcaacgtgaatcacaagcccagcaacaccaaggtggacaagaaggtg

SEQ ID NO: 2440 - DNA, 644 bp, synthetic construct
  misc_feature 1..644: note = Synthetic polynucleotide encoding artificial human antibody VL chain
  source 1..644: mol_type = other DNA
gcgacatccagatgacccagtctccatcttccctgtctgcatctgtgggagacagagtcagcatcacttgtcgggcgagtcagggtgttagcagctacttagcctggtatcaaaagaaaccagggagagcccctaaactcctgatctatagtgcatccagtttgcaaagtggggtcccatcaaggttcagcggcagtggatctgggacagatttcactctcaccatcaccggcctgcagcctgaagattttgcaacttacttttgtcaacagactaacactttccccctcactttcggcggagggaccaaggtggagatcaaacgaactgtggctgcaccatctgtcttcatcttcccgccatctgatgagcagttgaaatctggaactgcctctgttgtgtgcctgctgaataacttctatcccagagaggccaaagtacagtggaaggtggataacgccctccaatcgggtaactcccaggagagtgtcacagagcaggacagcaaggacagcacctacagcctcagcagcaccctgacgctgagcaaagcagactacgagaaacacaaactctacgcctgcgaagtcacccatcagggcctgagctcgcccgtcacaaagagcttcaacaggggagagtgt

SEQ ID NO: 2441 - DNA, 644 bp, synthetic construct
  misc_feature 1..644: note = Synthetic polynucleotide encoding artificial human antibody VL chain
  source 1..644: mol_type = other DNA
gtgacatccagatgacccagtctccatcctccctgtctgcatctgttggagacagagtcaccatcacttgccgggcaagtcagagcattggcagctatttaaattggtatcagcagaaaccagggaaagcccctaagctcctgatctatgctgcatccagtttgcaaagtggggtcccatcaaggttcagtggcagtggatctgggacagatttcactctcaccatcagcagtctgcaacctgaagattttgcaacttactactgtcaacagagttacagtacccctccgcgttttggccaggggaccaagctggagatcaaacgaactgtggctgcaccatctgtcttcatcttcccgccatctgatgagcagttgaaatctggaactgcctctgttgtgtgcctgctgaataacttctatcccagagaggccaaagtacagtggaaggtggataacgccctccaatcgggtaactcccaggagagtgtcacagagcaggacagcaaggacagcacctacagcctcagcagcaccctgacgctgagcaaagcagactacgagaaacacaaagtctacgcctgcgaagtcacccatcagggcctgagctcgcccgtcacaaagagcttcaacaggggagagtgt

SEQ ID NO: 2442 - DNA, 644 bp, synthetic construct
  misc_feature 1..644: note = Synthetic polynucleotide encoding artificial human antibody VL chain
  source 1..644: mol_type = other DNA
gcgacatccagatgacccagtctccatcttacgtgtctgcatctgtaggagacagagtcaccatcacttgtcgggcgagtcagggtattgacgtctggttggcctggtatcagcagaaaccagggaaagcccctaagctcctgatctatactgcatccagtttacaaagtggggtcccatcaaggtttagcggcagtggaggtgggacagaattcactctcaccatcagcagcctgcagcccgaggattttgcaacttactattgtcaacagtctaacagtttccccgggactttcggccctgggaccaaagtggatgtcaaacgaactgtggctgcaccatctgtcttcatcttcccgccatctgatgagcagttgaaatctggaactgcctctgttgtgtgcctgctgaataacttctatcccagagaggccaaagtacagtggaaggtggataacgccctccaatcgggtaactcccaggagagtgtcacagagcaggacagcaaggacagcacctacagcctcagcagcaccctgacgctgagcaaagcagactacgagaaacacaaagtctacgcctgcgaagtcacccatcagggcctgagctcgcccgtcacaaagagcttcaacaggggagagtgt

SEQ ID NO: 2443 - DNA, 331 bp, synthetic construct
  misc_feature 1..331: note = Synthetic polynucleotide encoding artificial human antibody VL chain
  source 1..331: mol_type = other DNA
ccgtctgtgctgactcagccaccctcagcgtctgggacccccgggcagagggtcaccatctcttgttctggaagcagttccaacatcggaagtaattatgtatactggtaccagcagctcccaggaacggcccccaaattcctcatctataggaataatcagcggccctcaggggtccctgaccgattctctggctccaagtctggcacctcagcctccctggccatcagtgggctccggtccgaggatgaggctgattattactgtgcagcatgggaggacagcctgagtggtccggtgttcggcggagggaccaagctgaccgtcctag

SEQ ID NO: 2444 - DNA, 636 bp, synthetic construct
  misc_feature 1..636: note = Synthetic polynucleotide encoding artificial human antibody VL chain
  source 1..636: mol_type = other DNA
tcttctgagctgactcaggaccctgctgtgtctgtggccttgggacagacagtcaggatcacatgccaaggagacagcctcagaaactattatgcaagttggttccagcagaagccaggacaggcccctgtacttgtcatctttggtaaaaactaccggccctccgggatcccagaccgattctctggctccaactcaggaaacacagcttccctgaccatcactggggctcaggcggaagatgaggccgactactactgtaactcccgggacaggagtggttatgtcttcggatccgggaccaaggtcaccgtcctaggtcagcccaaggccaaccccactgtcactctgttcccgccctcctctgaggagctccaagccaacaaggccacactagtgtgtctgatcagtgacttctacccgggagctgtgacagtggcctggaaggcagatggcagccccgtcaaggcgggagtggagaccaccaaaccctccaaacagagcaacaacaagtacgcggccagcagctacctgagcctgacgcccgagcagtggaagtcccacagaagctacagctgccaggtcacgcatgaagggagcaccgtggagaagacagtggcccctacagaatgttca

SEQ ID NO: 2445 - DNA, 642 bp, synthetic construct
  misc_feature 1..642: note = Synthetic polynucleotide encoding artificial human antibody VL chain
  source 1..642: mol_type = other DNA
ctctatgtgctgactcagccaccctcagtgtcagtggccccaggaacgacggcctggatttcctgtgggggaaacaacattggaattaaaagtgtccactggtaccagcagaagccaggccaggcccctctgttggtcatctcttatgatagcgaccggccctcagtgatccctgagcgattctctgtctccaactctgggaacacggtcaccctgaccatcagcagggtcgaagccggggatgaagccgactattactgtcaggtgtgggataatggtcattctcattgggtgttcggcggagggaccaagctgaccgtcctaggtcagcccaaggctgccccctcggtcactctgttcccgccctcctctgaggagcttcaagccaacaaggccacactggtgtgtctcataagtgacttctacccgggagccgtgacagtggcctggaaggcagatagcagccccgtcaaggcgggagtggagaccaccacaccctccaaacaaagcaacaacaagtacgcggccagcagctacctgagcctgacgcctgagcagtggaagtcccacagaagctacagctgccaggtcacgcatgaagggagcaccgtggagaagacagtggcccctacagaatgttca

SEQ ID NO: 2446 - DNA, 319 bp, synthetic construct
  misc_feature 1..319: note = Synthetic polynucleotide encoding artificial human antibody VL chain
  source 1..319: mol_type = other DNA
gacatccagatgacccagtctccatcctccctgtctgcatctgtaggagacagagtcaccatcacttgccgggcaagtcagagcataagcagttatttaaattggtatcagcaaaaacccgggagagcccctaggctcctgatctatgctgcatccaggttgcaaattggggtcccatcaaggttcagtggcagtggatctgggacagatttcactctcaccatcagcagtctgcagcctgaagattttgcaacttactactgtcaacagagttacagaatgccttgcagttttggccaggggaccaagctggagatca

SEQ ID NO: 2447 - DNA, 650 bp, synthetic construct
  misc_feature 1..650: note = Synthetic polynucleotide encoding artificial human antibody VL chain
  source 1..650: mol_type = other DNA
gagaaattgtgttgacgcagtctccaggcaccctgtctttgtctccaggggaaagagccaccctctcctgcagggccagtcagagtgttagcagcagctacttagcctggtaccagcagaaacctggccaggctcccaggctcctcatctatgatgcatccagcagggccactggcatcccagacaggttcagtggcagtgggtctgggacagacttcactctcaccatcagcagactggagcctgaagattttgcagtgtattactgtcagcagtatggtagctcacctcccatcaccttcggccaagggacacgactggagattaaacgaactgtggctgcaccatctgtcttcatcttcccgccatctgatgagcagttgaaatctggaactgcctctgttgtgtgcctgctgaataacttctatcccagagaggccaaagtacagtggaaggtggataacgccctccaatcgggtaactcccaggagagtgtcacagagcaggacagcaaggacagcacctacagcctcagcagcaccctgacgctgagcaaagcagactacgagaaacacaaactctacgcctgcgaagtcacccatcagggcctgagctcgcccgtcacaaagagcttcaacaggggagagtgt

SEQ ID NO: 2448 - DNA, 331 bp, synthetic construct
  misc_feature 1..331: note = Synthetic polynucleotide encoding artificial human antibody VL chain
  source 1..331: mol_type = other DNA
cattttatgctgactcagccccactctgtgtcggagtctccggggaagacggtaaccatctcctgcacccgcagcagtggcaacattgccagctactatgtgcagtggtatcagcagcgcccgggcagtgcccccaccactgtgatctatgaggatgaccaaagaccttctggggtccctgatcggttctctgcctccatcgacagctcctccaactctgcctccctcaccatctctggactgaagactgaggacgaggctgactattattgtcagtcttatgatacaaccaatgtgatattcggcggagggaccaagctgaccgtgctcg

SEQ ID NO: 2449 - DNA, 645 bp, synthetic construct
  misc_feature 1..645: note = Synthetic polynucleotide encoding artificial human antibody VL chain
  source 1..645: mol_type = other DNA
gaaattgttttgacgcagtctccaggcaccctgtctttgtctccaggggaaagagccaccctctcctgcagggccagtcagagtgttagcagcagttacttagcctggtatcagcagaaacctggccaggctcccaggctcctcatctttggtgcatccaccagggcctctggcatcccagacaggttcagtggccgtgggtctgggacagagttcactctcaccatcagcagactggagcctgaagattttgcagtgtattactgtcaacagtatgatagttcacccttcactttcggccctgggaccaaggtggagatcaaacgaactgtggctgcaccatctgtcttcatcttcccgccatctgatgagcagttgaaatctggaactgcctctgttgtgtgcctgctgaataacttctatcccagagaggccaaagtacagtggaaggtggataacgccctccaatcgggtaactcccaggagagtgtcacagagcaggacagcaaggacagcacctacagcctcagcagcaccctgacgctgagcaaagcagactacgagaaacacaaactctacgcctgcgaagtcacccatcagggcctgagctcgcccgtcacaaagagcttcaacaggggagagtgt

SEQ ID NO: 2450 - DNA, 645 bp, synthetic construct
  misc_feature 1..645: note = Synthetic polynucleotide encoding artificial human antibody VL chain
  source 1..645: mol_type = other DNA
ccgtctgtgttgacgcagccgccctcagtgtctgcggccccaggacagaacgtcaccatttcctgctctggaagtagctccaatattgagaataatgatgtatcctggtaccagcagctcccaggaacagcccccaaagtcatcatctatgaaaataatcagcgaccctcagggattcctgaccgattctctggctccaagtctggcacgtcagccaccctgggcatcaccggactccagactggggacgaggccgattattactgcggaacatgggatgacaacctgagtgctgtattcggcggagggaccaaactgaccgtcctaggtcagcccaaggctgccccctcggtcactctgttcccgccctcctctgaggagcttcaagccaacaaggccacactggtctgtctcataagtgacttctacccgggagccgtgacagtggcctggaaggcagatagcagccccgtcaaggcgggagtggagaccaccacaccctccaaacaaagcaacaacaagtacgcggccagcagctatctgagcctgacgcctgagcagtggaagtcccacagaagctacagctgccaggtcacgcatgaagggagcaccgtggagaagacagtggcccctacagaatgttca

SEQ ID NO: 2451 - DNA, 337 bp, synthetic construct
  misc_feature 1..337: note = Synthetic polynucleotide encoding artificial human antibody VL chain
  source 1..337: mol_type = other DNA
gatgttgtgatgactcagtctccactctccctgcccgtcacccttggacagccggcctccatctcctgcaggtctagtcaaagcctcgtacacagtgatggaaacacctacttgaattggtttcaacagaggccaggccaatctccaaggcgcctaatttatatggtttctaaccgggactctggggtcccagacagattcagcggcagtgggtcaggcactgatttcacactgaaaatcagcagggtggaggctgaggatgttggggtttattactgcctgcaaggtacacactggcctccgacgatcggccaggggaccaaggtggaaatcgaac

SEQ ID NO: 2452 - DNA, 648 bp, synthetic construct
  misc_feature 1..648: note = Synthetic polynucleotide encoding artificial human antibody VL chain
  source 1..648: mol_type = other DNA
ccgtctggactgactcagccaccctcggcgtctgggacccccgggcagagggtcaccatgtcttgctctggaagcagctccaatatcgggagaaattatgtttactggtaccaacaactcccaggagcggcccccaaactcctcatctatagggataatcagcggccctcaggggtccctgatcgattctctggctccaagtctggcacctcagcctccctggccatcagtgggctccggtccgaggatgaggctgattattactgtgcagcatgggatgacaatgtgagtggtcctggcttcggagctgggaccaggctcaccgtcctaggtcagcccaaggccaaccccactgtcactctgttcccgccctcctctgaggagctccaagccaacaaggccacactagtgtgtctgatcagtgacttctacccgggagctgtgacagtggcctggaaggcagatggcagccccgtcaaggcgggagtggagaccaccaaaccctccaaacagagcaacaacaagtacgcggccagcagctacctgagcctgacgcccgagcagtggaagtcccacagaagctacagctgccaggtcacgcatgaagggagcaccgtggagaagacagtggcccctacagaatgttca

SEQ ID NO: 2453 - DNA, 648 bp, synthetic construct
  misc_feature 1..648: note = Synthetic polynucleotide encoding artificial human antibody VL chain
  source 1..648: mol_type = other DNA
cccgctgtgctgactcagtcaccctcagcgtctgggacccccgggcagagggtcaccatctcttgttttgggagcatctccaacatcggaagtaatcctgtaaactggtaccagcaggtcccaggagcggcccccaaactcctcatctatagtagtagtcagcggccctcaggggtccctgaccgattctctggctccaagtctggcacctcagcctccctggccatcagtggcctccagtctgaggatgaggctgactattactgtgcaacatgggatgacagcctgaatggtccggtgttcggcggagggaccaagcttaccgtccttggtcagcccaaggctgccccctcggtcactctgttcccgccctcctctgaggagcttcaagccaacaaggccacactggtgtgtctcataagtgacttctacccgggagccgtgacagtggcctggaaggcagatagcagccccgtcaaggcgggagtggagaccaccacaccctccaaacaaagcaacaacaagtacgcggccagcagctacctgagcctgacgcctgagcagtggaagtcccacagaagctacagctgccaggtcacgcatgaagggagcaccgtggagaagacagtggcccctacagaatgttca

SEQ ID NO: 2454 - DNA, 639 bp, synthetic construct
  misc_feature 1..639: note = Synthetic polynucleotide encoding artificial human antibody VL chain
  source 1..639: mol_type = other DNA
gaaacagtgatgacgcagtctccagccaccctgtctgtgtctccgggggatagagccaccctctcctgcagggccagtcagaatgttaacttcaacttagcctggtaccagcagaaacctggccaggctcccaggctcctcatctatgatgcatccaccagggccactggtatccctgccaggttcagtggcagtgcgtctgggacagagttcacgctcaccatcaacagcctgcagtctgaagattttgcagtttactactgtcagcagtataataactggtggacgttcggccaagggaccaaactggagatcaaacgaactgtggctgcaccatctgtcttcatcttcccgccatctgatgagcagttgaaatctggaactgcctctgttgtgtgcctgctgaataacttctatcccagagaggccaaagtacagtggaaggtggataacgccctccaatcgggtaactcccaggagagtgtcacagagcaggacagcaaggacagcacctacagcctcagcagcaccctgacgctgagcaaagcagactacgagaaacacaaagtctacgcctgcgaagtcacccatcagggcctgagctcgcccgtcacaaagagcttcaacaggggagagtgg

SEQ ID NO: 2455 - DNA, 647 bp, synthetic construct
  misc_feature 1..647: note = Synthetic polynucleotide encoding artificial human antibody VL chain
  source 1..647: mol_type = other DNA
cagaaattgtgttgacgcagtctccaggcaccctgtctttgtctccaggggaaagagccaccctctcctgcagggccagtcagagtgttagcagcagctccttagcctggtaccagcagaaacctggccaggctcccaggctcctcatctatggtgcatccagcagggccactggcatcccagacaggttcagtggcagtgggtctgggacagacttcactctcaccatcagcagactggagcctgaagattttgcagtgtattactgtcagcaatatggtagttttcggtacacttttggccaggggaccaagctggagatcaaacgaactgtggctgcaccatctgtcttcatcttcccgccatctgatgagcagttgaaatctggaactgcctctgttgtgtgcctgctgaataacttctatcccagagaggccaaagtacagtggaaggtggataacgccctccaatcgggtaactcccaggagagtgtcacagagcaggacagcaaggacagcacctacagcctcagcagcaccctgacgctgagcaaagcagactacgagaaacacaaagtctacgcctgcgaagtcacccatcagggcctgagctcgcccgtcacaaagagcttcaacaggggagagtgg

SEQ ID NO: 2456 - DNA, 639 bp, synthetic construct
  misc_feature 1..639: note = Synthetic polynucleotide encoding artificial human antibody VL chain
  source 1..639: mol_type = other DNA
ccctatgagctgacacagccaccctcggtgtcagtgtccccaggacagacggccaggatcacctgctctggagatgctttgccaaagcaatatgcttattggtaccagcagaagccaggccaggcccctgtgctggtgatatataaagacagtgagaggccctcagggatccctgagcgattctctggctccagctcagggacaacagtcacgttgaccatcagtggagtccaggcagaagacgaggctgactattactgtcaatcagcagacagcagtgatacttatgtgttcggcggagggaccaagttgaccgtcctaggtcagcccaaggctgccccctcggtcactctgttcccgccctcctctgaggagcttcaagccaacaaggccacactggtgtgtctcataagtgacttctacccgggagccgtgacagtggcctggaaggcagatagcagccccgtcaaggcgggagtggagaccaccacaccctccaaacaaagcaacaacaagtacgcggccagcagctatctgagcctgacgcctgagcagtggaagtcccacagaagctacagctgccaggtcacgcatgaagggagcaccgtggagaagacagtggcccctacagaatgttca

SEQ ID NO: 2457 - DNA, 644 bp, synthetic construct
  misc_feature 1..644: note = Synthetic polynucleotide encoding artificial human antibody VL chain
  source 1..644: mol_type = other DNA
cagaaattgtgttgacacagtctccagccaccctgtctttgtctccaggggaaagagccaccctctcctgcagggccagtcagagtgttagcagctacttagcctggtaccaacagaaacctggccaggctcccaggctcctcatctatgatgcatccaacagggccactggcatcccagccaggttcagtggcagtgggtctgggacagacttcactctcaccatcagcagcctagagcctgaagattttgcagtttattactgtcagcagcgtagcaactggcctctcactttcggcggagggaccaaggtggagatcaaacgaactgtggctgcaccatctgtcttcatcttcccgccatctgatgagcagttgaaatctggaactgcctctgttgtgtgcctgctgaataacttctatcccagagaggccaaagtacagtggaaggtggataacgccctccaatcgggtaactcccaggagagtgtcacagagcaggacagcaaggacagcacctacagcctcagcagcaccctgacgctgagcaaagcagactacgagaaacacaaagtctacgcctgcgaagtcacccatcagggcctgagctcgcccgtcacaaagagcttcaacaggggagagtgg

SEQ ID NO: 2458 - DNA, 647 bp, synthetic construct
  misc_feature 1..647: note = Synthetic polynucleotide encoding artificial human antibody VL chain
  source 1..647: mol_type = other DNA
gagaaattgtgttgacacagtcgccagccaccctgtctttgtctccaggggaaagagccaccctctcctgcagggccagtcagagtgttggcagctacttagcctggtaccaacagaaacctggccaggctcccaggctcctcatctatgatgcatccaacagggccactggcatcccagccaggttcagtggcagtgggtctgggacagacttcactctcaccatcagcagcctagagcctgaagattttgcagtttattactgtcagcagggtagcaactggttggcgctcactttcggcggagggaccaaggtggagatcaaacgaactgtggctgcaccatctgtcttcatcttcccgccatctgatgagcagttgaaatctggaactgcctctgttgtgtgcctgctgaataacttctatcccagagaggccaaagtacagtggaaggtggataacgccctccaatcgggtaactcccaggagagtgtcacagagcaggacagcaaggacagcacctacagcctcagcagcaccctgacgctgagcaaagcagactacgagaaacacaaagtctacgcctgcgaagtcacccatcagggcctgagctcgcccgtcacaaagagcttcaacaggggagagtgt

SEQ ID NO: 2459 - DNA, 639 bp, synthetic construct
  misc_feature 1..639: note = Synthetic polynucleotide encoding artificial human antibody VL chain
  source 1..639: mol_type = other DNA
atccagatgacccagtctccatcctccctgtctgcatctgtaggagacagagtcaccatcacttgccgggcgagtcaggccattgccaactctttagcctggtatcagcagagaccagggaaagcccctaagctcctgatctatgctgcatccagtttggaaagtggggtcccatccaggttcagcggcagtggatctgggacggattacactctcaccatcagcagcctgcagcctgaagactttgcaacctattactgtcaacagtattatattaaccctcggacgttcggccaagggaccaaggtggaaatcaaacgaactgtggctgcaccatctgtcttcatcttcccgccatctgatgagcagttgaaatctggaactgcctctgttgtgtgcctgctgaataacttctatcccagagaggccaaagtacagtggaaggtggataacgccctccaatcgggtaactcccaggagagtgtcacagagcaggacagcaaggacagcacctacagcctcagcagcaccctgacgctgagcaaagcagactacgagaaacacaaagtctacgcctgcgaagtcacccatcagggcctgagctcgcccgtcacaaagagcttcaacaggggagagtgt

SEQ ID NO: 2460 - DNA, 660 bp, synthetic construct
  misc_feature 1..660: note = Synthetic polynucleotide encoding artificial human antibody VL chain
  source 1..660: mol_type = other DNA
ggcatcgtgatgacccagtctccagactccctggctgtgtctctgggcgagagggccaccatcaactgcaagtccagccagagtgttttatacagctccaacaatgagaactacttagcttggtaccagcagaaaccaggacagcctcctaagctgctcatttactgggcatctacccgggaatccggggtccctgaccgattcagtggcagcgggtctgggacagatttcactctcaccatcagcagcctgcaggctgaagatgtggcagtttattactgtcagcaatattatagtactccgtacacttttggccaggggaccaagctggagatcaaacgaactgtggctgcaccatctgtcttcatcttcccgccatctgatgagcagttgaaatctggaactgcctctgttgtgtgcctgctgaataacttctatcccagagaggccaaagtacagtggaaggtggataacgccctccaatcgggtaactcccaggagagtgtcacagagcaggacagcaaggacagcacctacagcctcagcagcaccctgacgctgagcaaagcagactacgagaaacacaaagtctacgcctgcgaagtcacccatcagggcctgagctcgcccgtcacaaagagcttcaacaggggagagtgg

SEQ ID NO: 2461 - DNA, 320 bp, synthetic construct
  misc_feature 1..320: note = Synthetic polynucleotide encoding artificial human antibody VL chain
  source 1..320: mol_type = other DNA
gacatccagatgacccagtctccatcctccctgtctgcatctgtaggagacagagtcaccatctcttgccgggcaagtcacaacattaacacctatttaaattggtatcaacacaaaccagggaaagcccctaagatcgtgatttatggtgcatccagtttgcaaagtggagtcccatcaaggttcagtggcagtggatctgggacagacttctctctcaccatcagcagtctgcagcgtgaagattttgcaacttacttctgtcaacagagtttcaacaccgtgctcactttcggcggagggaccagggtggatatcaa

SEQ ID NO: 2462 - DNA, 651 bp, synthetic construct
  misc_feature 1..651: note = Synthetic polynucleotide encoding artificial human antibody VL chain
  source 1..651: mol_type = other DNA
cagtctgccctgactcagcctgcctccgtgtctgggtctcctggacagtcgatcaccatctcctgcactggaaccagcagtgacgttggtggttataactatgtctcctggtaccaacagcacccaggcaaagcccccaaactcatgatttatgaggtcagtaatcggccctcaggggtttctaatcgcttctctggctccaagtctggcaacacggcctccctgaccatctctgggctccaggctgaggacgaggctgattatcactgcagctcatatacaatcaccagcacgctttgggtgttcggcggagggaccaagctgaccgtcctaggtcagcccaaggctgccccctcggtcactctgttcccaccctcctctgaggagcttcaagccaacaaggccacactggtgtgtctcataagtgacttctacccgggagccgtgacagtggcctggaaggcagatagcagccccgtcaaggcgggagtggagaccaccacaccctccaaacaaagcaacaacaagtacgcggccagcagctacctgagcctgacgcctgagcagtggaagtcccacaaaagctacagctgccaggtcacgcatgaagggagcaccgtggagaagacagtggcccctacagaatgttca

SEQ ID NO: 2463 - DNA, 648 bp, synthetic construct
  misc_feature 1..648: note = Synthetic polynucleotide encoding artificial human antibody VL chain
  source 1..648: mol_type = other DNA
cagtctgtgctgactcagccaccctcagcgtctgggacccccgggcagggggtcaccatctcttgttctggaaccagcgccaacatcggaaagaattatgtatcttggtaccagcacctcccgggaacggcccccagactcctcatctataggattgatcagcggccctcaggggtccctgaccgattctctggctccaagtctggcacctcagcctccctggccatcagtgggctccggcccgaggatgaggctgattattactgtgcagcatgggatgacagcctgagtggtccggtattcggcggagggaccaagctgaccgtcctaggtcagcccaaggctgccccctcggtcactctgttcccgccctcctctgaggagcttcaagccaacaaggccacactggtgtgtctcataagtgacttctacccgggagccgtgacagtggcctggaaggcagatagcagccccgtcaaggcgggagtggagaccaccacaccctccaaacaaagcaacaacaagtacgcggccagcagctatctgagcctgacgcctgagcagtggaagtcccacagaagctacagctgccaggtcacgcatgaagggagcaccgtggagaagacagtggcccctacagaatgttca

SEQ ID NO: 2464 - DNA, 642 bp, synthetic construct
  misc_feature 1..642: note = Synthetic polynucleotide encoding artificial human antibody VL chain
  source 1..642: mol_type = other DNA
gacctgcagatgacccagtctccatcctccctgtctgcatctataggagacagagtcaccatcacttgccgggcaagtcagagcattagcacttatttcaattggtatcagcagaaaccagggaaagcccctaagctcctgatctatgctgcatccagtttgcaaagtggggtcccatcaaggttcagtggcagtggatctgggacagatttcactctcaccatcaccagtctgcagcctgaagactttgcaacttactactgtcagcagacttacagtaatccttggacgttcggccaagggaccaaggtggacttcaaacgaactgtggctgcaccatctgtcttcatcttcccgccatctgatgagcagttgaaatctggaactgcctctgttgtgtgcctgctgaataacttctatcccagagaggccaaagtacagtggaaggtggataacgccctccaatcgggtaactcccaggagagtgtcacagagcaggacagcaaggacagcacctacagcctcagcagcaccctgacgctgagcaaagcagactacgagaaacacaaagtctacgcctgcgaagtcacccatcagggcctgagctcgcccgtcacaaagagcttcaacaggggagagtgg

SEQ ID NO: 2465 - DNA, 644 bp, synthetic construct
  misc_feature 1..644: note = Synthetic polynucleotide encoding artificial human antibody VL chain
  source 1..644: mol_type = other DNA
gtgacatccagatgacccagtctccgtcctccctgtctgcatctgtaggagatagagttaccatcacttgccgggcaagtcagagcattaagaactatgtaaattggtatcagcagaaaccaggagaagcccctaacctcttgatctttgctgcatccaatttgcaaagtggggtcccatcaaggttcactggcagtggatctgggacagatttctctctcaccatcagcagtctgcaacctgaagactttgcagcttactactgtcaacagacttacagtcaccctcgcacgttcggccaagggaccagggtggaaatcaaacgaactgtggctgcaccatctgtcttcatcttcccgccatctgatgagcagttgaaatctggaactgcctctgttgtgtgcctgctgaataacttctatcccagagaggccaaagtacagtggaaggtggataacgccctccaatcgggtaactcccaggagagtgtcacagagcaggacagcaaggacagcacctacagcctcagcagcaccctgacgctgagcaaagcagactacgagaaacacaaactctacgcctgcgaagtcacccatcagggcctgagctcgcccgtcacaaagagcttcaacaggggagagtgt

SEQ ID NO: 2466 - DNA, 651 bp, synthetic construct
  misc_feature 1..651: note = Synthetic polynucleotide encoding artificial human antibody VL chain
  source 1..651: mol_type = other DNA
caatctgtcctgacgcagccgccctcagtgtctggggccccagggcagagggtcaccatctcctgcactgggagcagctccaacatcggggcaggttatgatgtacactggtaccagcaccttccaggaacagcccccaaactcctcatttatggtgacagccatcggccctcaggggtccctgacggattctctggctccaagtctggcacctcagcctccctggccatcactgggctccaggctgaggatgaggctgattattactgccagtcctatgacagcagcctgagtggttatgtcttcggaactgggaccaaggtcaccgtcctaggtcagcccaaggccaaccccactgtcactctgttcccgccctcctctgaggagcttcaagccaacaaggccacactagtgtgtctgatcagtgacttctacccgggagctgtgacagtggcctggaaggcagatggcagccccgtcaaggcgggagtggagaccaccaaaccctccaaacagagcaacaacaagtacgcggccagcagctacctgagcctgacgcccgagcagtggaagtcccacagaagctacagctgccaggtcacgcatgaagggagcaccgtggagaagacagtggcccctacagaatgttca

SEQ ID NO: 2467 - DNA, 325 bp, synthetic construct
  misc_feature 1..325: note = Synthetic polynucleotide encoding artificial human antibody VL chain
  source 1..325: mol_type = other DNA
tcctatgtgctgactcagccaccctcggtgtcagtggccccaggacagacggccaggattgcctgtgggggaaacaacattggaagtaaaactgtgcactggtaccagcagaagccaggccaggcccctatggtggtcgtctatgatgatagcgaccggccctcagggatccctgagcgattctctggctccaactctgggaacacggccaccctgaccatcagcagggtcgaagccggggatgaggccgactactactgtcaggtgtgggatagtagtagtgatcattatgtcctcggaactgggaccaaggtcaccgtcctag

SEQ ID NO: 2468 - DNA, 644 bp, synthetic construct
  misc_feature 1..644: note = Synthetic polynucleotide encoding artificial human antibody VL chain
  source 1..644: mol_type = other DNA
gcgacatccagatgacccagtctccatcttctgtgtctgcatctgtaggggacagagtcaccatcacttgtcgggcgagtcaggatattagcaactggttagcctggtatctgcagaaaccagggaaagcccctaagctcctgatctatgctgcatccagtttgcaaagtggagtcccatccaggttcagcggcagtggatctgggacagatttcactctcaccatcagcagcctgcagcctgaagattttgcgacttactattgtcaacagactagcagtttccctcgaactttcggccctgggaccaaagtggatatcaaacgaactgtggctgcaccatctgtcttcatcttcccgccatctgatgagcagttgaaatctggaactgcctctgttgtgtgcctgctgaataacttctatcccagagaggccaaagtacagtggaaggtggataacgccctccaatcgggtaactcccaggagagtgtcacagagcaggacagcaaggacagcacctacagcctcagcagcaccctgacgctgagcaaagcagactacgagaaacacaaagtctacgcctgcgaagtcacccatcagggcctgagctcgcccgtcacaaagagcttcaacaggggagagtgt

SEQ ID NO: 2469 - DNA, 639 bp, synthetic construct
  misc_feature 1..639: note = Synthetic polynucleotide encoding artificial human antibody VL chain
  source 1..639: mol_type = other DNA
ccctatgagctgacacagccaccctcggtgtcagtgtccccaggacagacggccaggatcacctgctctggagatgcattgccaaacgaaaatgctttttggtaccagcagaagccaggccaggcccctgtgttggtgatatatgaggacattaagaggccctcagggatccctgagcgattctctggctccagttcagggacaacagtcacattgaccatcagtggggtccaggcagaggacgaggctgactattactgtcaatcagtagacattacttctacttgggtgttcggcggggggaccaagctgaccgtcctaggtcagcccaaggctgccccctcggtcactctgttcccgccctcctctgaggagcttcaagccaacaaggccacactggtgtgtctcataagtgacttctacccgggagccgtgacagtggcctggaaggcagatagcagccccgtcaaggcgggagtggagaccaccacaccctccaaacaaagcaacaacaagtacgcggccagcagctacctgagcctgacgcctgagcagtggaagtcccacaaaagctacagctgccaggtcacgcatgaagggagcaccgtggagaagacagtggcccctacagaatgttca

SEQ ID NO: 2470 - DNA, 651 bp, synthetic construct
  misc_feature 1..651: note = Synthetic polynucleotide encoding artificial human antibody VL chain
  source 1..651: mol_type = other DNA
cagtctgccctgactcagcctccctccgtgtccgggtctcctggacagtcagtcaccatctcctgcactggaaccaccagtgacattggtagttatgaccgtgtctcctggtaccagaagcccccaggcacagcccccaaactcatcatttatgaggtcagtcatcggccctcaggggtccctgatcgcttctctgggtccaagtctggcaacacggcctccctgaccatctctgggctccaggctgaggacgaggctgattattattgcagctcatatataagtagcctcacttatgtgctgttcggcggagggaccaagctgaccgtcctgggtcagcccaaggctgccccctcggtcactctgttcccgccctcctctgaggagcttcaagccaacaaggccacactggtgtgtctcataagtgacttctacccgggagccgtgacagtggcctggaaggcagatagcagccccgtcaaggcgggagtggagaccaccacaccctccaaacaaagcaacaacaagtacgcggccagcagctacctgagcctgacgcctgagcagtggaagtcccacagaagctacagctgccaggtcacgcatgaagggagcaccgtggagaagacagtggcccctacagaatgttca

SEQ ID NO: 2471 - DNA, 648 bp, synthetic construct
  misc_feature 1..648: note = Synthetic polynucleotide encoding artificial human antibody VL chain
  source 1..648: mol_type = other DNA
ccctctgtgttgacgcagccgccctcagtgtctgcggccccaggacagaaggtcaccatctcctgctctggaagcagctccaacattgggaacaattatgtgtcctggtaccagcagctcccaggaacagcccccaaactcctcatttatgacaataataagcgaccctcagggatccgtgaccgattctctggctccaagtctggcacctcagccaccctgggcatcaccggactccagactggggacgaggccgactattactgcggaacatgggatagtagcctgagtgttggggtgttcggcggagggaccaagctgaccgtcctaggtcagcccaaggctgccccctcggtcactctgttcccgccctcctctgaggagcttcaagccaacaaggccacactggtgtgtctcataagtgacttctacccgggagccgtgacagtggcctggaaggcagatagcagccccgtcaaggcgggagtggagaccaccacaccctccaaacaaagcaacaacaagtacgcggccagcagctacctgagcctgacgcctgagcagtggaagtcccacaaaagctacagctgccaggtcacgcatgaagggagcaccgtggagaagacagtggcccctacagaatgttca

SEQ ID NO: 2472 - DNA, 657 bp, synthetic construct
  misc_feature 1..657: note = Synthetic polynucleotide encoding artificial human antibody VL chain
  source 1..657: mol_type = other DNA
ggggttgtgatgactcagtctccactctccctgcccgtcacccttggacagccggcctccatctcctgcaggtctagtcaaagcctcgtatacagtgatggaaacacctacttgaattggtttcagcagaggccaggccaatctccaaggcgcctaatttataaggtttctaaccgggactctggggtcccagacagattcagcggcagtgggtcaggcactgatttcacactgaaaatcagcagggtggaggctgaggatgttggggtttattactgcatgcaaggtacacactggccgatcaccttcggccaagggacacgactggagattaaacgaactgtggctgcaccatctgtcttcatcttcccgccatctgatgagcagttgaaatctggaactgcctctgttgtgtgcctgctgaataacttctatcccagagaggccaaagtacagtggaaggtggataacgccctccaatcgggtaactcccaggagagtgtcacagagcaggacagcaaggacagcacctacagcctcagcagcaccctgacgctgagcaaagcagactacgagaaacacaaagtctacgcctgcgaagtcacccatcagggcctgagctcgcccgtcacaaagagcttcaacaggggagagtgg

SEQ ID NO: 2473 - DNA, 325 bp, synthetic construct
  misc_feature 1..325: note = Synthetic polynucleotide encoding artificial human antibody VL chain
  source 1..325: mol_type = other DNA
gaaattgtgttgacgcagtctccaggcaccctgtctttgtctccaggggaaagagccaccctctcctgcagggccagtcagagtattagaagcagctacttagcctggtaccagcagaaacctggccaggctcccaggctcctcatctatggtgcatccagcagggccactggcatcccagacaggttcagtggcagtgggtctgggacagacttcactctcaccatcagcagactggagcctgaagattttgcagtgtattactgtcagcagtatgatagctcatcgtggacgttcggccaagggaccaaggtggaaatcaaac

SEQ ID NO: 2474 - DNA, 651 bp, synthetic construct
  misc_feature 1..651: note = Synthetic polynucleotide encoding artificial human antibody VL chain
  source 1..651: mol_type = other DNA
ccctctgtgctgacgcagccgccctcagtgtctggggccccagggcagagggtcaccatctcctgctctgggagcacctccaacatcggggctggttatgatgtacactggtaccagcaatttccaggaacagcccccaaactcctcatctatggtaacatctttcggccgtcaggggtccctgaccgattctctggctccaagtctggcacctcagcctccctggccatcactgggctccaggctgaggacgaggctgcttattactgccagtcgtatgacagcagcctgagaggtgtggtgttcggcggagggacctacctgaccgtcctaggtcagcccaaggctgccccctcggtcactctgttcccgccctcctctgaggagcttcaagccaacaaggccacactggtgtgtctcataagtgacttctacccgggagccgtgacagtggcctggaaggcagatagcagccccgtcaaggcgggagtggagaccaccacaccctccaaacaaagcaacaacaagtacgcggccagcagctatctgagcctgacgcctgagcagtggaagtcccacagaagctacagctgccaggtcacgcatgaagggagcaccgtggagaagacagtggcccctacagaatgttca

SEQ ID NO: 2475 - DNA, 644 bp, synthetic construct
  misc_feature 1..644: note = Synthetic polynucleotide encoding artificial human antibody VL chain
  source 1..644: mol_type = other DNA
gtgacatccagatgacccagtctccatcctccctgtctgcatctgtaggagacagagtcaccatcacttgccgggcaagtcagagcattagcagctatttaaattggtatcagcagaaaccagggaaagcccctaagctcctgatctatgctgcatccagtttgcaaagtggggtcccatcaaggttcagtggcagtggatctgggacagatttcactctcaccatcagcagtctgcaacctgaagattttgcaacttactactgtcaacagagttacagtacccctcggacgttcggccaagggaccaaggtggaaatcaaacgaactgtggctgcaccatctgtcttcatcttcccgccatctgatgagcagttgaaatctggaactgcctctgttgtgtgcctgctgaataacttctatcccagagaggccaaagtacagtggaaggtggataacgccctccaatcgggtaactcccaggagagtgtcacagagcaggacagcaaggacagcacctacagcctcagcagcaccctgacgctgagcaaagcagactacgagaaacacaaagtctacgcctgcgaagtcacccatcagggcctgagctcgcccgtcacaaagagcttcaacaggggagagtgg

SEQ ID NO: 2476 - DNA, 660 bp, synthetic construct
  misc_feature 1..660: note = Synthetic polynucleotide encoding artificial human antibody VL chain
  source 1..660: mol_type = other DNA
ggcatcgtgatgacccagtctccagactccctggctgtgtctctgggcgagagggccaccatcaactgcaagtccagccagaatgttttatacagttccaacaataaaaactacttaggttggtaccagcagaaaccaggacagcctcctaagttgctcatttactgggcatctacccgggaatcgggggtccctgaccgattcagtggcagcgggtctgggacagatttcactctcaccatcaacagcctgcaggctgaagatgtggcagtttattactgtcagcaatattatagcactccgtggacgttcggccaagggaccaaggtggaaatcaaacgaactgtggctgcaccatctgtcttcatcttcccgccatctgatgagcagttgaaatctggaactgcctctgttgtgtgcctgctgaataacttctatcccagagaggccaaagtacagtggaaggtggataacgccctccaatcgggtaactcccaggagagtgtcacagagcaggacagcaaggacagcacctacagcctcagcagcaccctgacgctgagcaaagcagactacgagaaacacaaagtctacgcctgcgaagtcacccatcagggcctgagctcgcccgtcacaaagagcttcaacaggggagagtgg

SEQ ID NO: 2477 - DNA, 657 bp, synthetic construct
  misc_feature 1..657: note = Synthetic polynucleotide encoding artificial human antibody VL chain
  source 1..657: mol_type = other DNA
ccgtctgtgctgacgcagccgccctcagtgtctggggccccagggcagaaggtcaccatctcctgcactgggagcagctccaacatcggggcaggttatgatgtacactggtaccagcagcttccaggaacagcccccaaactcctcatctatcgtaacaacaatcggccctcaggggtccctgaccgattctctggctccaagtctggcacctcagcctccctggccatcactggactccagactgaggatgaggctgattattactgccagtcctatgacagcggcctgagtggttcgaaggtggtcttcggcggagggaccaagctgaccgtcctaggtcagcccaaggctgccccctcggtcactctgttcccgccctcctctgaggagcttcaagccaacaaggccacactggtgtgtctcataagtgacttctacccgggagccgtgacagtggcctggaaggcagatagcagccccgtcaaggcgggagtggagaccaccacaccctccaaacaaagcaacaacaagtacgcggccagcagctatctgagcctgacgcctgagcagtggaagtcccacagaagctacagctgccaggtcacgcatgaagggagcaccgtggagaagacagtggcccctacagaatgttca

SEQ ID NO: 2478 - DNA, 648 bp, synthetic construct
  misc_feature 1..648: note = Synthetic polynucleotide encoding artificial human antibody VL chain
  source 1..648: mol_type = other DNA
cattttatgctgactcagccccactctgtgtcggagtctccggggaagacggtaaccatctcctgcacccgcagcagtggcagcattgccagcagctatgtgcagtggtaccagcagcgcccgggcagttcccccaccactatgatctatgaggataaaaaaagaccctctggtgtccctgatcgcttctctggctccatcgacagctcctccaactctgcctccctcaccatctctggactgaagactgaggacgaggctgactactactgtcagtcttatgatctcagcacttgggtgttcggcggagggaccaagctgaccgtcctaggtcagcccaaggctgccccctcggtcactctgttcccgccctcctctgaggagcttcaagccaacaaggccacactggtgtgtctcataagtgacttctacccgggagccgtgacagtggcctggaaggcagatagcagccccgtcaaggcgggagtggagaccaccacaccctccaaacaaagcaacaacaagtacgcggccagcagctacctgagcctgacgcctgagcagtggaagtcccacagaagctacagctgccaggtcacgcatgaagggagcaccgtggagaagacagtggcccctacagaatgttca

SEQ ID NO: 2479 - DNA, 642 bp, synthetic construct
  misc_feature 1..642: note = Synthetic polynucleotide encoding artificial human antibody VL chain
  source 1..642: mol_type = other DNA
gacatccagatgacccagtctccattctccctgtctgcatctgttggagacagagtcaccatcacttgccgggcaagtcagagcattagcagctatttaaattggtatcagcagaaaccagggaaagcccctaagctcctgatctatgctgcatccagtttgcaaagtggggtcccatcaaggttcagtggcagtggatctgggacagatttcactctcaccatcagcagtctgcaacctgaagattttgcaacttactactgtcaccagagttacagtacctctctcactttcggcggagggaccaaggtggagatcaaacgaactgtggctgcaccatctgtcttcatcttcccgccatctgatgagcagttgaaatctggaactgcctctgttgtgtgcctgctgaataacttctatcccagagaggccaaagtacagtggaaggtggataacgccctccaatcgggtaactcccaggagagtgtcacagagcaggacagcaaggacagcacctacagcctcagcagcaccctgacgctgagcaaagcagactacgagaaacacaaagtctacgcctgcgaagtcacccatcagggcctgagctcgcccgtcacaaagagcttcaacaggggagagtgt

SEQ ID NO: 2480 - DNA, 642 bp, synthetic construct
  misc_feature 1..642: note = Synthetic polynucleotide encoding artificial human antibody VL chain
  source 1..642: mol_type = other DNA
tcctatgtgctgactcagccaccctcagtgtcagtggccccaggaaagacggccaggattacctgtgggggaaacaacattggaagtaaaagtgtgcactggtaccagcagaagccaggccaggcccctgtgctggtcatctattatgatagcgaccggccctcagggatccctgagcgattctctggctccaactctgggaacacggccaccctgaccatcagcagggtcgaagccggggatgaggccgactattactgtcaggtgtgggatagtagtagtgatcattgggtgttcggcggagggaccaagctgaccgtcctaggtcagcccaaggctgccccctcggtcactctgttcccgccctcctctgaggagcttcaagccaacaaggccacactggtgtgtctcataagtgacttctacccgggagccgtgacagtggcctggaaggcagatagcagccccgtcaaggcgggagtggagaccaccacaccctccaaacaaagcaacaacaagtacgcggccagcagctacctgagcctgacgcctgagcagtggaagtcccacaaaagctacagctgccaggtcacgcatgaagggagcaccgtggagaagacagtggcccctacagaatgttca

SEQ ID NO: 2481 - DNA, 648 bp, synthetic construct
  misc_feature 1..648: note = Synthetic polynucleotide encoding artificial human antibody VL chain
  source 1..648: mol_type = other DNA
cagtctgccctgactcagcctgcctccgtgtctgggtctcctggacagtcgatcaccatctcctgcactggaaccagcagtgacgttggtggttataactatgtctcctggtaccaacagcacccaggcaaagcccccaaactcatgatttatgatgtcagtaatcggccctcaggggtttctaatcgcttctctggctccaagtctggcaacacggcctccctgaccatctctgggctccaggctgaggacgaggctgattattactgcagctcatatacaagcagcagcactcaggtattcggcggagggaccaagctgaccgtcctaggtcagcccaaggctgccccctcggtcactctgttcccgccctcctctgaggagcttcaagccaacaaggccacactggtgtgtctcataagtgacttctacccgggagccgtgacagtggcctggaaggcagatagcagccccgtcaaggcgggagtggagaccaccacaccctccaaacaaagcaacaacaagtacgcggccagcagctatctgagcctgacgcctgagcagtggaagtcccacagaagctacagctgccaggtcacgcatgaagggagcaccgtggagaagacagtggcccctacagaatgttca

SEQ ID NO: 2482 - DNA, 644 bp, synthetic construct
  misc_feature 1..644: note = Synthetic polynucleotide encoding artificial human antibody VL chain
  source 1..644: mol_type = other DNA
gtgacatccagatgacccagtctccatcctccctgtctgcatctgtaggagacagagtcaccatcacttgccgggcaagtcagagcattagcagctatttaaattggtatcagcagaaaccagggaaagcccctaagctcctgatctatgctgcatccagtttgcaaagtggggtcccatcaaggttcagtggcagtggatctgggacagatttcactctcaccatcagcagtctgcaacctgaagattttgcaacttactactgtcaacagagttacagtacccctaagacgttcggccaagggaccaaggtggaaatcaaacgaactgtggctgcaccatctgtcttcatcttcccgccatctgatgagcagttgaaatctggaactgcctctgttgtgtgcctgctgaataacttctatcccagagaggccaaagtacagtggaaggtggataacgccctccaatcgggtaactcccaggagagtgtcacagagcaggacagcaaggacagcacctacagcctcagcagcaccctgacgctgagcaaagcagactacgagaaacacaaagtctacgcctgcgaagtcacccatcagggcctgagctcgcccgtcacaaagagcttcaacaggggagagtgg

SEQ ID NO: 2483 - DNA, 325 bp, synthetic construct
  misc_feature 1..325: note = Synthetic polynucleotide encoding artificial human antibody VL chain
  source 1..325: mol_type = other DNA
gccatccagttgacccagtctccatcctccctgtctgcatctgtaggcgacagagtcatcctcacttgccgggcaagtcagggcattaacagtgccttagcctggtatcagcaaaaaccagggaaacctcctaagctcctgatttatgctgcctccagtttggaaagtggggtcccatcgaggttcagcggcagtgggtctgggacagatttcactctcaccatcagcaacctgcagcctgaagattttgcaacttatttctgtcaacagtttaatacttaccctctgtacacctttggccaggggaccaagctggatatcacga

SEQ ID NO: 2484 - DNA, 328 bp, synthetic construct
  misc_feature 1..328: note = Synthetic polynucleotide encoding artificial human antibody VL chain
  source 1..328: mol_type = other DNA
gtttcttctgagctgactcaggaccctgctgtgtctgtggccttgggacagacagtcaggatcacatgccaaggagacagcctcagaaggtattatgcaagctggtaccagcagaaggcaggacaggcccctatacttgtcatctatggtgaaaacaaccggccctcagggatcccagaccgattctctggctccggctcaggaaacacagcttccttgaccatcactggggctcaggcggaagatgaggctgactattactgtgactcccgggacagcagtggtaacctcgtggtattcggcggagggaccaagctgaccgtcctag

SEQ ID NO: 2485 - DNA, 642 bp, synthetic construct
  misc_feature 1..642: note = Synthetic polynucleotide encoding artificial human antibody VL chain
  source 1..642: mol_type = other DNA
gacatccagatgacccagtccccatcttccgtgcctgcatctgtaggagacagagtcaccatcacttgtcgggcgagtcagggtattaggaattggttagcctggtatcggcagagaccagggaaagcccctgagctcctaatctatgctgcatccaatttgcaatttggggtcccatcaaggttcagcggcagtggatctgggacagacttcgctctcaccatcagcagcgtgcagcctgaagattttgcaacttactattgtcaacagactaacagtttcccccggactttcggccctgggaccaaagtggatatcaaacgaactgtggctgcaccatctgtcttcatcttcccgccatctgatgagcagttgaaatctggaactgcctctgttgtgtgcctgctgaataacttctatcccagagaggccaaagtacagtggaaggtggataacgccctccaatcgggtaactcccaggagagtgtcacagagcaggacagcaaggacagcacctacagcctcagcagcaccctgacgctgagcaaagcagactacgagaaacacaaagtctacgcctgcgaagtcacccatcagggcctgagctcgcccgtcacaaagagcttcaacaggggagagtgg

SEQ ID NO: 2486 - DNA, 645 bp, synthetic construct
  misc_feature 1..645: note = Synthetic polynucleotide encoding artificial human antibody VL chain
  source 1..645: mol_type = other DNA
gacatccagatgacccagtctccatcctccctgtctgcatctgtaggagacagaatcaccatcacttgccgggcaagtcagagcgttggcacctatttaagttggtttcagcagaaaccagggaaagcccctaagctcctgatttatgctgcatccagtttacaaagtggggtcccgtcaaggttcagtggcagtggatccgggacagatttcactctcaccatcagcagtctgcaacctgaagattttgcaacttacttttgtcaacagagttacagtgtccctccgtggacgttcggccaagggaccaaggtggaaatcaaacgaactgtggctgcaccatctgtcttcatcttcccgccatctgatgagcagttgaaatctggaactgcctctgttgtgtgcctgctgaataacttctatcccagagaggccaaagtacagtggaaggtggataacgccctccaatcgggtaactcccaggagagtgtcacagagcaggacagcaaggacagcacctacagcctcagcagcaccctgacgctgagcaaagcagactacgagaaacacaaagtctacgcctgcgaagtcacccatcagggcctgagctcgcccgtcacaaagagcttcaacaggggagagtgg

SEQ ID NO: 2487 - DNA, 648 bp, synthetic construct
  misc_feature 1..648: note = Synthetic polynucleotide encoding artificial human antibody VL chain
  source 1..648: mol_type = other DNA
gaagttgtattgacgcagtctccaggcaccctgtctttgtctccaggggaaagagcgaccctctcctgcagggccagtcagagcgttagcagtaattacttagcctggtaccagcaaaaacttggccaggctcccaggctcctcatctatggtgcatccagcagggccactggcatcccagacaggttcagtggcagtgggtctgggacagacttcactctcaccatcagcagactggaggctgaagattttgcagtgtattactgtcagcaatatggtagctcacctcggtacacttttggccaggggaccaaggtggagatcagacgaactgtggctgcaccatctgtcttcatcttcccgccatctgatgagcagttgaaatctggaactgcctctgttgtgtgcctgctgaataacttctatcccagagaggccaaagtacagtggaaggtggataacgccctccaatcgggtaactcccaggagagtgtcacagagcaggacagcaaggacagcacctacagcctcagcagcaccctgacgctgagcaaagcagactacgagaaacacaaactctacgcctgcgaagtcacccatcagggcctgagctcgcccgtcacaaagagcttcaacaggggagagtgg

SEQ ID NO: 2488 - DNA, 644 bp, synthetic construct
  misc_feature 1..644: note = Synthetic polynucleotide encoding artificial human antibody VL chain
  source 1..644: mol_type = other DNA
cagaaattgtgttgacgcagtctccaggcaccctgtctttgtctccaggggaaagagccaccctctcctgcagggccagtcagagtgttagcagcaggtacttagcctggtaccagcagaaacctggccaggctcccaggctcctcatccatggtgcatccagcagggccactggcatcccagacaggttcagtggcagtgggtctgggacagacttcactctcaccatcagcagactggagcctgaagattttgcagtgtattactgtcagcagtatggtagcgcgtggacgttcggccaagggaccaaggtggaaatcaaacgaactgtggctgcaccatctgtcttcatcttcccgccatctgatgagcagttgaaatctggaactgcctctgttgtgtgcctgctgaataacttctatcccagagaggccaaagtacagtggaaggtggataacgccctccaatcgggtaactcccaggagagtgtcacagagcaggacagcaaggacagcacctacagcctcagcagcaccctgacgctgagcaaagcagactacgagaaacacaaagtctacgcctgcgaagtcacccatcagggcctgagctcgcccgtcacaaagagcttcaacaggggagagtgg

SEQ ID NO: 2489 - DNA, 645 bp, synthetic construct
  misc_feature 1..645: note = Synthetic polynucleotide encoding artificial human antibody VL chain
  source 1..645: mol_type = other DNA
gaaattgtgttgacacagtctccagccaccctgtccttgtctccaggggaaagagccaccctctcctgcagggccagtcagagtgttggcagctccttagcctggtaccaacagaaacctggccaggctcccaggctcctcatctttgattcatccaacagggccactgccatcccagccaggttcactggcagtgggtctgggacagacttcactctcaccatcagcagcctagagcctgaagattttgcagtttattactgtcagcagcgtgccaactggcctcctatcaccttcggccaagggacacgactggacattagacgaactgtggctgcaccatctgtcttcatcttcccgccatctgatgagcagttgaaatctggaactgcctctgttgtgtgcctgctgaataacttctatcccagagaggccaaagtacagtggaaggtggataacgccctccaatcgggtaactcccaggagagtgtcacagagcaggacagcaaggacagcacctacagcctcagcagcaccctgacgctgagcaaagcagactacgagaaacacaaagtctacgcctgcgaagtcacccatcagggcctgagctcgcccgtcacaaagagcttcaacaggggagagtgt

SEQ ID NO: 2490 - DNA, 644 bp, synthetic construct
  misc_feature 1..644: note = Synthetic polynucleotide encoding artificial human antibody VL chain
  source 1..644: mol_type = other DNA
gtgacatccagatgacccagtctccttccaccctgtctgcatctgtaggagacagagtcaccatcacttgccgggccagtcagagtattagtagctggttggcctggtatcagcagaaaccagggaaagcccctaagctcgtgatctataaggcatctagtttaaaaagtggggtcccatcaaggttcagcggcagtggatctgggacagagttcactctcaccatcagcagcctgcagcctgatgattttgctacttattactgccaacagtataatagttacccgtggacgttcggccaagggaccaaggtggaaatcaaacgaactgtggctgcaccatctgtcttcatcttcccgccatctgatgagcagttgaaatctggaactgcctctgttgtgtgcctgctgaataacttctatcccagagaggccaaagtacagtggaaggtggataacgccctccaatcgggtaactcccaggagagtgtcacagagcaggacagcaaggacagcacctacagcctcagcagcaccctgacgctgagcaaagcagactacgagaaacacaaagtctacgcctgcgaagtcacccatcagggcctgagctcgcccgtcacaaagagcttcaacaggggagagtgg

SEQ ID NO: 2491 - DNA, 645 bp, synthetic construct
  misc_feature 1..645: note = Synthetic polynucleotide encoding artificial human antibody VL chain
  source 1..645: mol_type = other DNA
ccctatgtgctgactcagccaccctcagtgtcagtggccccaggaaagacggccaggattacctgtgggggaaacaacattggaagtaaaagtgtgcactggtaccagcagaagccaggccaggcccctgtgctggtcatctattatgatagcgaccggccctcagggatccctgagcgattctctggctccaactctgggaacacggccaccctgaccatcagcagggtcgaagccggggatgaggccgactattactgtcaggtgtgggatagtagtagtgatcattatgtggtattcggcggagggaccaagctgaccgtcctaggtcagcccaaggctgccccctcggtcactctgttcccgccctcctctgaggagcttcaagccaacaaggccacactggtgtgtctcataagtgacttctacccgggagccgtgacagtggcctggaaggcagatagcagccccgtcaaggcgggagtggagaccaccacaccctccaaacaaagcaacaacaagtacgcggccagcagctacctgagcctgacgcctgagcagtggaagtcccacagaagctacagctgccaggtcacgcatgaagggagcaccgtggagaagacagtggcccctacagaatgttca

SEQ ID NO: 2492 - DNA, 327 bp, synthetic construct
  misc_feature 1..327: note = Synthetic polynucleotide encoding artificial human antibody VL chain
  source 1..327: mol_type = other DNA
gagaaattgtgttgacacagtctccagccaccctgtctttgtctccaggggaaagagccaccctctcctgcagggccagtcagagtgttagcacctacttagcctggtaccaacagaaacctggccaggctcccaggctcctcatctatgatgcatccaacagggccactggcatcccagccaggttcagtggcagtgggtctgggacagacttcactctcaccatcagcagcctagagcctgaagattttgcagtttattactgtcagcagcgtagcaactggcctccgctcactttcggcggagggaccaaggtggagatcgaac

SEQ ID NO: 2493 - DNA, 659 bp, synthetic construct
  misc_feature 1..659: note = Synthetic polynucleotide encoding artificial human antibody VL chain
  source 1..659: mol_type = other DNA
gggatattgtgatgactcagtctccactctccctgcccgtcacccctggagagccggcctccatctcctgcaggtctagtcagagcctcctgcatagtaatggatacaactatttggattggtacgtgcagaagccagggcagtctccacagctcctgatctatttggggtctaatcgggcctccggggtcactgacaggctcagtggcagtggatcaggcacagatttcacactggaaatcggcagagtggaggctgaggatgttggggtttattactgcatgcaagctctacaaactccctacacttttggccaggggaccaagctggagatcagacgaactgtggctgcaccatctgtcttcatcttcccgccatctgatgagcagttgaaatctggaactgcctctgttgtgtgcctgctgaataacttctatcccagagaggccaaagtacagtggaaggtggataacgccctccaatcgggtaactcccaggagagtgtcacagagcaggacagcaaggacagcacctacagcctcagcagcaccctgacgctgagcaaagcagactacgagaaacacaaagtctacgcctgcgaagtcacccatcagggcctgagctcgcccgtcacaaagagcttcaacaggggagagtgt

SEQ ID NO: 2494 - DNA, 641 bp, synthetic construct
  misc_feature 1..641: note = Synthetic polynucleotide encoding artificial human antibody VL chain
  source 1..641: mol_type = other DNA
gtgacatccagatgacccagtctccttccaccctgtctgcatctgtaggagacagagtcaccatcacttgccgggccagtcagagtattagtagctggttggcctggtatcagcagaaaccagggaaagcccctaagctcctgatctataaggcgtctagtttagaaagtggggtcccatcaaggttcagcggcagtggatctgggacagaattcactctcaccatcagcagcctgcagcctgatgattttgcaacttattactgccaacagtataatagttattcgacgttcggccaagggaccaaggtggaaatcaaacgaactgtggctgcaccatctgtcttcatcttcccgccatctgatgagcagttgaaatctggaactgcctctgttgtgtgcctgctgaataacttctatcccagagaggccaaagtacagtggaaggtggataacgccctccaatcgggtaactcccaggagagtgtcacagagcaggacagcaaggacagcacctacagcctcagcagcaccctgacgctgagcaaagcagactacgagaaacacaaagtctacgcctgcgaagtcacccatcagggcctgagctcgcccgtcacaaagagcttcaacaggggagagtgg

SEQ ID NO: 2495 - DNA, 333 bp, synthetic construct
  misc_feature 1..333: note = Synthetic polynucleotide encoding artificial human antibody VL chain
  source 1..333: mol_type = other DNA
ctcagactgtggtgacccaggagccgtcggtctcagtgtcccctggagggacagtcacactcacttgtggcttgaggtctggctcagtctcaactggaaactaccccagctggtaccagcagaccccaggccaggctccacgcactctcatctacaacattaatactcggtcgtccggggtccctcatcgcttctctgcctccattattgataacagagctgccctcaccatcacgggggcccagtcagatgatgaatctctttattactgtttgctatatatgggcagtggcatttcggttttcggcggagggaccaaggtgaccgtcttag

SEQ ID NO: 2496 - DNA, 648 bp, synthetic construct
  misc_feature 1..648: note = Synthetic polynucleotide encoding artificial human antibody VL chain
  source 1..648: mol_type = other DNA
gaaattgtcttgacgcagtctccaggcaccctgtcttcgactctaggtgaaagagccaccctctcctgcagggccagtcagagtgttagcagcagctacttagcctggtaccaacagaaacctggccaggctcccaggctcctcatctatggtgcatcccgcagggccactggcatcccagacaggttcagtggcagtgggtctgggacagacttcactctcaccatcagcagactggagcctgaagattttgcagtgtattactgtcagcactatggtgcctcaccgccgtggacgttcggccaagggaccaaggtggaaatcaaacgaactgtggctgcaccatctgtcttcatcttcccgccatctgatgagcagttgaaatctggaactgcctctgttgtgtgcctgctgaataacttctatcccagagaggccaaagtacagtggaaggtggataacgccctccaatcgggtaactcccaggagagtgtcacagagcaggacagcaaggacagcacctacagcctcagcagcaccctgacgctgagcaaagcagactacgagaaacacaaagtctacgcctgcgaagtcacccatcagggcctgagctcgcccgtcacaaagagcttcaacaggggagagtgt

SEQ ID NO: 2497 - DNA, 645 bp, synthetic construct
  misc_feature 1..645: note = Synthetic polynucleotide encoding artificial human antibody VL chain
  source 1..645: mol_type = other DNA
ccctatgtgctgactcagccaccctcggtgtcagtggccccaggacagacggccagaattacctgtgggggaaacaacattggaagtaagagtgtgcactggtaccagcagaagccaggccaggcccctgtgatggtcgtctatgctgatagagagcggccctcagggatccccgagcgactctctggctccaactttgggaacacggccaccctgaccatcagcagggtcgaagccggggatgaggccgactattactgtcaggtgtgggatagtaataatgatcaccgggaggtgttcggcggagggaccaagctgaccgtcctaggtcagcccaaggctgccccctcggtcactctgttcccgccctcctctgaggagcttcaagccaacaaggccacactggtgtgtctcataagtgacttctacccgggagccgtgacagtggcctggaaggcagatagcagccccgtcaaggcgggagtggagaccaccacaccctccaaacaaagcaacaacaagtacgcggccagcagctacctgagcctgacgcctgagcagtggaagtcccacaaaagctacagctgccaggtcacgcatgaagggagcaccgtggagaagacagtggcccctacagaatgttca

SEQ ID NO: 2498 - DNA, 642 bp, synthetic construct
  misc_feature 1..642: note = Synthetic polynucleotide encoding artificial human antibody VL chain
  source 1..642: mol_type = other DNA
gacatccagatgacccagtctccttccaccctgtctgcatctgtaggagacagagtcaccatcacttgccgggccagtcagagtattagtaggtggttggcctggtatcagcagaaaccagggaaagcccctaaactcctgatctataaggcgtctgctttagaaagtggggtcccatcaaggttcagcggcagtggatctgggacagaattcactctcaccatcagcagcctgcaacctgatgattttgcaacttattactgccaacagtatgatagttatcctctctctttcggcggagggaccaaggtggagatcaaacgaactgtggctgcaccatctgtcttcatcttcccgccatctgatgagcagttgaaatctggaactgcctctgttgtgtgcctgctgaataacttctatcccagagaggccaaagtacagtggaaggtggataacgccctccaatcgggtaactcccaggagagtgtcacagagcaggacagcaaggacagcacctacagcctcagcagcaccctgacgctgagcaaagcagactacgagaaacacaaagtctacgcctgcgaagtcacccatcagggcctgagctcgcccgtcacaaagagcttcaacaggggagagtgg

SEQ ID NO: 2499 - DNA, 642 bp, synthetic construct
  misc_feature 1..642: note = Synthetic polynucleotide encoding artificial human antibody VL chain
  source 1..642: mol_type = other DNA
gcaacgacactcacgcagtctccagcattcatgtcagcgactccaggagacagagtcaacatctcctgcaaagccagccaagacattgatgatgatatgaactggtaccaacagaaaccaggagaagctgctattttcattattcaagaagctactactctcgttcctggcgtcccacctcgattcagtggcagcgggtatgggacagattttaccctcacaattaataacatagaatctgaggatgctgcatattacttctgtctacaacatgataatttcccgtacacttttggccaggggaccaagctggagatcaaacgaactgtggctgcaccatctgtcttcatcttcccgccatctgatgagcagttgaaatctggaactgcctctgttgtgtgcctgctgaataacttctatcccagagaggccaaagtacagtggaaggtggataacgccctccaatcgggtaactcccaggagagtgtcacagagcaggacagcaaggacagcacctacagcctcagcagcaccctgacgctgagcaaagcagactacgagaaacacaaagtctacgcctgcgaagtcacccatcagggcctgagctcgcccgtcacaaagagcttcaacaggggagagtgg

SEQ ID NO: 2500 - DNA, 645 bp, synthetic construct
  misc_feature 1..645: note = Synthetic polynucleotide encoding artificial human antibody VL chain
  source 1..645: mol_type = other DNA
gaaattgtgttgacgcagtctccaggcaccctgtctttgtctccaggggaaagagccatcctctcctgcagggccggtcagagtattggcgccgcctacttagcctggtaccaacagaaacctggccaggctcccagactcctcatctctggtgcatccaggagggccactggcatcccagacaggttcagtggcagtgggtctgggacagacttcactctcaccatcagcagactagagcctgaagattttgcagtgtattactgtcagcaatacggcagttcaccgctcaccttcggcggagggaccaaggtggagatcaaacgaactgtggctgcaccatctgtcttcatcttcccgccatctgatgagcagttgaaatctggaactgcctctgttgtgtgcctgctgaataacttctatcccagagaggccaaagtacagtggaaggtggataacgccctccaatcgggtaactcccaggagagtgtcacagagcaggacagcaaggacagcacctacagcctcagcagcaccctgacgctgagcaaagcagactacgagaaacacaaagtctacgcctgcgaagtcacccatcagggcctgagctcgcccgtcacaaagagcttcaacaggggagagtgt

SEQ ID NO: 2501 - DNA, 642 bp, synthetic construct
  misc_feature 1..642: note = Synthetic polynucleotide encoding artificial human antibody VL chain
  source 1..642: mol_type = other DNA
ctctatgagctgacacagccaccctcggtgtcagtgtccccaggacaaacggccaggatcacctgctctggagatgcattgccaaaaaaatatgcttattggtaccagcagaagtcaggccaggcccctgtgctggtcatctatgaggacagcaaacgaccctccgggatccctgagagattctctggctccagctcagggacaatggccaccttgactatcagtggggcccaggtggaggatgaagctgactactactgttactcaacagacagcagtggtaatcatggggtgttcggcggagggaccaagctgaccgtcctaggtcagcccaaggctgccccctcggtcactctgttcccaccctcctctgaggagcttcaagccaacaaggccacactggtgtgtctcataagtgacttctacccgggagccgtgacagtggcctggaaggcagatagcagccccgtcaaggcgggagtggagaccaccacaccctccaaacaaagcaacaacaagtacgcggccagcagctacctgagcctgacgcctgagcagtggaagtcccacaaaagctacagctgccaggtcacgcatgaagggagcaccgtggagaagacagtggcccctacagaatgttca

SEQ ID NO: 2502 - DNA, 659 bp, synthetic construct
  misc_feature 1..659: note = Synthetic polynucleotide encoding artificial human antibody VL chain
  source 1..659: mol_type = other DNA
gggatattgtgatgactcagtctccactctccctgcccgtcacccctggagagccggcctccatctcctgcaggtctagtcagagcctcctgcatagtgatggatacaactatttggattggtacctgcagaagccagggcagtctccacagctcctgatctacttgggttctaatcgggcctccggggtccctgacaggttcagtggcagtggatcaggcacagattttacactgaaaatcagcagagtggaggctgaggatgttggggtttattactgcatgcaagctctacaaactcctaacacttttggccaggggaccaagctggagatcaaacgaactgtggctgcaccatctgtcttcatcttcccgccatctgatgagcagttgaaatctggaactgcctctgttgtgtgcctgctgaataacttctatcccagagaggccaaagtacagtggaaggtggataacgccctccaatcgggtaactcccaggagagtgtcacagagcaggacagcaaggacagcacctacagcctcagcagcaccctgacgctgagcaaagcagactacgagaaacacaaagtctacgcctgcgaagtcacccatcagggcctgagctcgcccgtcacaaagagcttcaacaggggagagtgt

SEQ ID NO: 2503 - DNA, 651 bp, synthetic construct
  misc_feature 1..651: note = Synthetic polynucleotide encoding artificial human antibody VL chain
  source 1..651: mol_type = other DNA
cagtctgccctgactcagcctgcctccgtgtctgggtctcctggacagtcgatcaccatctcctgcactggaaccagcagtgacgttggtggttataactatgtctcctggtaccaacaccacccagacaaagcccccaaactcataatttatgaggtcaagaatcggccctcaggggtttctaatcgcttctctggctccaagtctgacaacacggcctccctgaccatctctgggctccaggctgaggacgaggctgattattactgcaactcatattcaagcagcagcactctttatgtcttcggaactgggaccaaggtcaccgtcctaagtcagcccaaggccaaccccactgtcactctgttcccgccctcctctgaggagctccaagccaacaaggccacactagtgtgtctgatcagtgacttctacccgggagctgtgacagtggcctggaaggcagatagcagccccgtcaaggcgggagtggagaccaccaaaccctccaaacagagcaacaacaagtacgcggccagcagctacctgagcctgacgcctgagcagtggaagtcccacagaagctacagctgccaggtcacgcatgaagggagcaccgtggagaagacagtggcccctacagaatgttca

SEQ ID NO: 2504 - DNA, 647 bp, synthetic construct
  misc_feature 1..647: note = Synthetic polynucleotide encoding artificial human antibody VL chain
  source 1..647: mol_type = other DNA
gagaaattgtgttgacgcagtctccagccaccctgtctttgtctccaggggaaagagccaccctctcctgcagggccagtcagagtattagcagtaacttagcctggtaccaacagaaacctggccaggctcccaggctcctcatctatgatgcatccaacagggccactggcatcccagccaggttcagtggcagtgggtctgggacagacttcactctcaccatcagcagcctcgagcctgaagattttgcagtttattactgtcaacaacatagcaactggcctgagctcactttcggcggagggaccaaggtggagatcaaacgaactgtggctgcaccatctgtcttcatcttcccgccatctgatgagcagttgaaatctggaactgcctctgttgtgtgcctgctgaataacttctatcccagagaggccaaagtacagtggaaggtggataacgccctccaatcgggtaactcccaggagagtgtcacagagcaggacagcaaggacagcacctacagcctcagcagcaccctgacgctgagcaaagcagactacgagaaacacaaagtctacgcctgcgaagtcacccatcagggcctgagctcgcccgtcacaaagagcttcaacaggggagagtgt

SEQ ID NO: 2505 - DNA, 648 bp, synthetic construct
  misc_feature 1..648: note = Synthetic polynucleotide encoding artificial human antibody VL chain
  source 1..648: mol_type = other DNA
gcctctgccctgactcagcctgcctccgtgtctgggtctcctggacagtcgatcaccatctcctgcactggaaccagcagtgacgttggtggttataactatgtctcctggtaccaacaacacccaggcaaagcccccaaactcatgatttatgatgtcagtaatcggccctcaggggtttctaatcgcttctctggctccaagtctggcaacacggcctccctgaccatctctgggctccaggctgaggacgaggctgattattactgcagctcgtatagaagcagcggcgtttatgtcttcggaactgggaccaaggtcaccgtcctaggtcagcccaaggccaaccccactgtcactctgttcccgccctcctctgaggagctccaagccaacaaggccacactagtgtgtctgatcagtgacttctacccgggagctgtgacagtggcctggaaggcagatggcagccccgtcaaggcgggagtggagaccaccaaaccctccaaacagagcaacaacaagtacgcggccagcagctacctgagcctgacgcccgagcagtggaagtcccacagaagctacagctgccaggtcacgcatgaagggagcaccgtggagaagacagtggcccctacagaatgttca

SEQ ID NO: 2506 - DNA, 657 bp, synthetic construct
  misc_feature 1..657: note = Synthetic polynucleotide encoding artificial human antibody VL chain
  source 1..657: mol_type = other DNA
caagttgtgatgacccagactccactctctctgtccgtcacccctggacagccggcctccatctcctgcaagtctagtcagcgcctcctgcatagtgatggaaagacctatttgtattggtacctgcagaagccaggccagtctccacagctcctgatctatgaagtttccaaccggttctctggagtgccagataggttcagtggcagcgggtcagggacagatttcacactgaaaatcagccgggtggaggctgcggatgttggggtttattactgcatgcaaagtatacaccttccgtacacttttggccaggggaccaagctggagatcaaacgaactgtggctgcaccatctgtcttcatcttcccgccatctgatgagcagttgaaatctggaactgcctctgttgtgtgcctgctgaataacttctatcccagagaggccaaagtacagtggaaggtggataacgccctccaatcgggtaactcccaggagagtgtcacagagcaggacagcaaggacagcacctacagcctcagcagcaccctgacgctgagcaaagcagactacgagaaacacaaagtctacgcctgcgaagtcacccatcagggcctgagctcgcccgtcacaaagagcttcaacaggggagagtgg

SEQ ID NO: 2507 - DNA, 648 bp, synthetic construct
  misc_feature 1..648: note = Synthetic polynucleotide encoding artificial human antibody VL chain
  source 1..648: mol_type = other DNA
gaaattgtgttgacgcagtctccaggcaccctgtctttgtctccaggggaaagagccaccctctcctgcagggccagtcagagtgtcagcagtagcttcttggcctggtaccagcagaaacctggccaggctcccagactcctcatctatggcgcatccagcagggccactggcgtcgcagacaggttcagtggcagtgggtctgggacagacttcactctcaccatcaacagactggagcctgaagattttgcagtgtattactgtcaccagtatggtggctcacctccaaacacttttggccaggggaccaaggtggagatcaaacgaactgtggctgcaccatctgtcttcatcttcccgccatctgatgagcagttgaaatctggaactgcctctgttgtgtgcctgctgaataacttctatcccagagaggccaaagtacagtggaaggtggataacgccctccaatcgggtaactcccaggagagtgtcacagagcaggacagcaaggacagcacctacagcctcagcagcaccctgacgctgagcaaagcagactacgagaaacacaaagtctacgcctgcgaagtcacccatcagggcctgagctcgcccgtcacaaagagcttcaacaggggagagtgt

SEQ ID NO: 2508 - DNA, 645 bp, synthetic construct
  misc_feature 1..645: note = Synthetic polynucleotide encoding artificial human antibody VL chain
  source 1..645: mol_type = other DNA
gacatccagttgacccagtctccatccttcctgtctgcatctgtaggagacagagtcaccatcacttgccgggccagtcaggacgttgacacttatttagcctggtatcagcaaaaaccagggaaagcccctaagctcctgatctatgctgcatccactttgcacagtggggtcccatcaaggttcagcggcagtggagctgggacagaattcactctcacaatcagcagcctgcagcctgaagattttgcaacttattattgtcaacaacttaatagttaccctccactcactttcggcggggggaccaaggtggagatcaaacgaactgtggctgcaccatctgtcttcatcttcccgccatctgatgagcagttgaaatctggaactgcctctgttgtgtgcctgctgaataacttctatcccagagaggccaaagtacagtggaaggtggataacgccctccaatcgggtaactcccaggagagtgtcacagagcaggacagcaaggacagcacctacagcctcagcagcaccctgacgctgagcaaagcagactacgagaaacacaaagtctacgcctgcgaagtcacccatcagggcctgagctcgcccgtcacaaagagcttcaacaggggagagtgt

SEQ ID NO: 2509 - DNA, 648 bp, synthetic construct
  misc_feature 1..648: note = Synthetic polynucleotide encoding artificial human antibody VL chain
  source 1..648: mol_type = other DNA
cagtctgtgttgacgcagccgccctcattatctgcggccccaggacagaaggtcataatctcctgctctggaagcagctccaatattgggaaatattctgttttctggtaccagcaagtcccaggaacaggccccaaactcctcatttttgacaataacagacgaccctctgggatccgtgaccgattctctgcctccaagtctggcacgtcagccaccctggagatcaccggcctccagactggggacgaggcacattattactgcgcaacatgggatagcagcctgactgctggggtgttcggcggagggaccaaactgaccgtcctacgtcagcccaaggctgccccctcggtcactctgttcccaccctcctctgaggagcttcaagccaacaaggccacactggtgtgtctcataagtgacttctacccgggagccgtgacagtggcctggaaggcagatggcagccccgtcaaggcgggagtggagaccaccacaccctccaaacaaagcaacaacaagtacgcggccagcagctacctgagcctgacgcctgagcagtggaagtcccacaaaagctacagctgccaggtcacgcatgaagggagcaccgtggagaagacagtggcccctacagaatgttca

SEQ ID NO: 2510 - DNA, 644 bp, synthetic construct
  misc_feature 1..644: note = Synthetic polynucleotide encoding artificial human antibody VL chain
  source 1..644: mol_type = other DNA
gagaaattgtgttgacacagtctccagccaccctgtccttgtctccaggaaatagagccgccctctcctgcagggccagtcagagtgttggtagctccttacactggtatcaacagaaacctggccaggcccccaggctcctcatctatgatgtgtccaacagggccgctggcatcccaggcaggttcagtgccagtgggtctgggacagacttcactctcaccatcagcaacctagagcctgaagattttgcagtttattactgtcagcagcgtagcgcctggcctatcactttcggccaagggacacgactggagattaaacgaactgtggctgcaccatctgtcttcatcttcccgccatctgatgagcagttgaaatctggaactgcctctgttgtgtgcctgctgaataacttctatcccagagaggccaaagtacagtggaaggtggataacgccctccaatcgggtaactcccaggagagtgtcacagagcaggacagcaaggacagcacctacagcctcagcagcaccctgacgctgagcaaagcagactacgagaaacacaaagtctacgcctgcgaagtcacccatcagggcctgagctcgcccgtcacaaagagcttcaacaggggagagtgt

SEQ ID NO: 2511 - DNA, 650 bp, synthetic construct
  misc_feature 1..650: note = Synthetic polynucleotide encoding artificial human antibody VL chain
  source 1..650: mol_type = other DNA
gagaaattgtgttgacgcagtctccaggcaccctgtctttgtctccaggggaaagagccaccctctcctgcagggccagtcagagtgttagcagcagctacttagcctggtaccagcagaaacctggccaggctcccaggctcctcatctctggtgcatccagcagggccactggcatcccagacaggttcagtggcagtgggtctgggacagacttcactctcaccatcagcagactggagcctgaagattttgcagtgtattactgtcagcagtatggtagctcacggaagctcactttcggcggagggaccaaggtggagatcaaacgaactgtggctgcaccatctgtcttcatcttcccgccatctgatgagcagttgaaatctggaactgcctctgttgtgtgcctgctgaataacttctatcccagagaggccaaagtacagtggaaggtggataacgccctccaatcgggtaactcccaggagagtgtcacagagcaggacagcaaggacagcacctacagcctcagcagcaccctgacgctgagcaaagcagactacgagaaacacaaagtctacgcctgcgaagtcacccatcagggcctgagctcgcccgtcacaaagagcttcaacaggggagagtgt

SEQ ID NO: 2512 - DNA, 322 bp, synthetic construct
  misc_feature 1..322: note = Synthetic polynucleotide encoding artificial human antibody VL chain
  source 1..322: mol_type = other DNA
gacatccagatgacccagtctccttccaccctgtctgcatctgtaggagacagagtcaccatcacttgccgggccagtcagagtattagtgtctggttggcctggtatcaacagaaaccagggaaagcccctaaactcctgatctataaggcgtctactttagaagctggggtcccatcgaggttttccggcagcggatctgggacagaattttctctcactatcagcggcctacagcctgatgactttggaacttatttctgtcaacactatgacagttatccgtggacgttcggccaagggaccaaggtggagatgaaac

SEQ ID NO: 2513 - DNA, 645 bp, synthetic construct
  misc_feature 1..645: note = Synthetic polynucleotide encoding artificial human antibody VL chain
  source 1..645: mol_type = other DNA
gtttcttccgagctgactcaggaccctgctgtgtctgtggccttgggacagacagtcaggatcacatgccaaggagacagtctcagaaggtattatgtaagctggtaccggcagaagccaggagaggcccctgtagttgtcatctatggtaaaaacaatcggccctcatggatcccagaccgactctctggctccagttcaggaaacacagcttccttgaccatcactggggctcaggcggaagatgaggctgactattactgttgttcccgggacagcagtggtaacccttgggtattcggcggagggaccaagctgaccgtcctaggtcagcccaaggctgccccctcggtcactctgttcccaccctcctctgaggagcttcaagccaacaaggccacactggtgtgtctcataagtgacttctacccgggagccgtgacagtggcctggaaggcagatagcagccccgtcaaggcgggagtggagaccaccacaccctccaaacaaagcaacaacaagtacgcggccagcagctacctgagcctgacgcctgagcagtggaagtcccacaaaagctacagctgccaggtcacgcatgaagggagcaccgtggagaagacagtggcccctacagaatgttca

SEQ ID NO: 2514 - DNA, 642 bp, synthetic construct
  misc_feature 1..642: note = Synthetic polynucleotide encoding artificial human antibody VL chain
  source 1..642: mol_type = other DNA
gtcatccagatgacccagtctccaacctccctgtctgcatctgtaggagacagagtcaccatcacttgccgggcaagtcagagcattagcagctatttaaattggtatcagcagaaactagggaaagcccctaagctcctgatctatgctgcatccagtttgcaaagtggggtcccatcaaggttcagtggcagtggatctgggacagatttcactctcaccatcagcagtctgcaacctgaagattttgcaacttactactgtcaacagagttacagcacgtcgctcactttcggcggagggaccaaggtggagatcaaacgaactgtggctgcaccatctgtcttcatcttcccgccatctgatgagcagttgaaatctggaactgcctctgttgtgtgcctgctgaataacttctatcccagagaggccaaagtacagtggaaggtggataacgccctccaatcgggtaactcccaggagagtgtcacagagcaggacagcaaggacagcacctacagcctcagcagcaccctgacgctgagcaaagcagactacgagaaacacaaagtctacgcctgcgaagtcacccatcagggcctgagctcgcccgtcacaaagagcttcaacaggggagagtgt

SEQ ID NO: 2515 - DNA, 653 bp, synthetic construct
  misc_feature 1..653: note = Synthetic polynucleotide encoding artificial human antibody VL chain
  source 1..653: mol_type = other DNA
gagaaattgtgttgacgcagtctccaggcaccctgtctttgtctccaggggaaagagccaccctctcctgcagggccagtcagagtgttagcagcagctacttagcctggtaccagcagaaacctggccaggctcccaggctcctcatctatgatgcatccagcagggccgctggcgtcccagacaggttcagtggcagtgggtctgggacagacttcactctcaccatcagcagactggagcctgaagattttgcagtgtatttctgtcagcagtatgatagctcacctcccatgtacacttttggccaggggaccaagctggagatcagacgaactgtggctgcaccatctgtcttcatcttcccgccatctgatgagcagttgaaatctggaactgcctctgttgtgtgcctgctgaataacttctatcccagagaggccaaagtacagtggaaggtggataacgccctccaatcgggtaactcccaggagagtgtcacagagcaggacagcaaggacagcacctacagcctcagcagcaccctgacgctgagcaaagcagactacgagaaacacaaagtctacgcctgcgaagtcacccatcagggcctgagctcgcccgtcacaaagagcttcaacaggggagagtgt

SEQ ID NO: 2516 - DNA, 651 bp, synthetic construct
  misc_feature 1..651: note = Synthetic polynucleotide encoding artificial human antibody VL chain
  source 1..651: mol_type = other DNA
ccgtctgtgttgacgcagccgccctcagtgtctgcggccccaggacagaaggtcaccatctcctgctctggaagcagctccaacattgacaataattatgtatcctggtaccagcagctcccaggaacagcccccaaactcctcatctatgaaaataataagcgagcctcagggattcctgaccgattctctggctccaagtctggcacgtcagccaccctgggcatcaccggactccagactggggacgaggccgattattactgcggaacatgggatagcagcctgagtcctgggggggtattcggcggagggaccaagctgaccgtcctaggtcagcccaaggctgccccctcggtcactctgttcccgccctcctctgaggagcttcaagccaacaaggccacactggtgtgtctcataagtgacttctacccgggagccgtgacagtggcctggaaggcagatagcagccccgtcaaggcgggagtggagaccaccacaccctccaaacaaagcaacaacaagtacgcggccagcagctatctgagcctgacgcctgagcagtggaagtcccacagaagctacagctgccaggtcacgcatgaagggagcaccgtggagaagacagtggcccctacagaatgttca

SEQ ID NO: 2517 - DNA, 641 bp, synthetic construct
  misc_feature 1..641: note = Synthetic polynucleotide encoding artificial human antibody VL chain
  source 1..641: mol_type = other DNA
gtgacatccagatgacccagtctccatcctccctgtctgcatctgtaggagacagagtcaccatcacttgccgggcaagtcagaccattagcacctacttaaattggtatcagcagaaaccagggaaagcccctaagctcctgatctatgctgcatccagtttacagagtggggtcccatcaaggttcagtggcagtggatctgagacagatttcactctcaccatcagcagtctgcaacctgaagattttgcaacttactactgtcaacagagttacaatgcccggacgttcggccaagggaccaaggtggaaatcaaacgaactgtggctgcaccatctgtcttcatcttcccgccatctgatgagcagttgaaatctggaactgcctctgttgtgtgcctgctgaataacttctatcccagagaggccaaagtacagtggaaggtggataacgccctccaatcgggtaactcccaggagagtgtcacagagcaggacagcaaggacagcacctacagcctcagcagcaccctgacgctgagcaaagcagactacgagaaacacaaagtctacgcctgcgaagtcacccatcagggcctgagctcgcccgtcacaaagagcttcaacaggggagagtgt

SEQ ID NO: 2518 - DNA, 665 bp, synthetic construct
  misc_feature 1..665: note = Synthetic polynucleotide encoding artificial human antibody VL chain
  source 1..665: mol_type = other DNA
gggacatcgtgatgacccagtctccagactccctggctgtgtctctgggcgagagggccaccatcaactgcaagtccagccagactgttttacacagttccaacaataggaactacttagcttggtatcagcacaaaccaggccagcctcctaagctgctcatttactgggcttctacccgggaatccggggtccctgaccgattcagtggcagcgggtctgggacagatttcactctcaccatcaacagccttcaggctgaagatgtggctgtttattactgtcagcaatattatgatactgctccgctcactttcggcggcgggaccaaggtggagatcaaacgaactgtggctgcaccatctgtcttcatcttcccgccatctgatgagcagttgaaatctggaactgcctctgttgtgtgcctgctgaataacttctatcccagagaggccaaagtacagtggaaggtggataacgccctccaatcgggtaactcccaggagagtgtcacagagcaggacagcaaggacagcacctacagcctcagcagcaccctgacgctgagcaaagcagactacgagaaacacaaagtctacgcctgcgaagtcacccatcagggcctgagctcgcccgtcacaaagagcttcaacaggggagagtgt

SEQ ID NO: 2519 - DNA, 642 bp, synthetic construct
  misc_feature 1..642: note = Synthetic polynucleotide encoding artificial human antibody VL chain
  source 1..642: mol_type = other DNA
gaaatagtgatgacgcagtctccagccaccctgtctgtgtctccaggggaaagggccaccctctcctgcagggccagtcagagtgttgacggcaacttagcctggtaccaacagaaacctggccaggctcccaggctcctcatctttgacgcatctaccagggccactactatcccagtcaggttcagtggcagtgggtctgggacagagttcactctcaccatcagcagcctgcagtctgaagattttgcagtttattactgtcagcagtatagtaaatggcccatcaccttcggccaagggacacgactggagattaaacgaactgtggctgcaccatctgtcttcatcttcccgccatctgatgagcagttgaaatctggaactgcctctgttgtgtgcctgctgaataacttctatcccagagaggccaaagtacagtggaaggtggataacgccctccaatcgggtaactcccaggagagtgtcacagagcaggacagcaaggacagcacctacagcctcagcagcaccctgacgctgagcaaagcagactacgagaaacacaaactctacgcctgcgaagtcacccatcagggcctgagctcgcccgtcacaaagagcttcaacaggggagagtgt

SEQ ID NO: 2520 - DNA, 644 bp, synthetic construct
  misc_feature 1..644: note = Synthetic polynucleotide encoding artificial human antibody VL chain
  source 1..644: mol_type = other DNA
gtgacatccagatgacccagtctccatcctccctgtctgcatctctaggagacagaatcaccatcacttgccgggcaactcagagcattagcaactatttaaattggtatcaacaaaaatcagggaaagtccctgaacttctgatttatgctgcatcccatttgcaaagtggggtcccatcaaggttcagtggcactggatctgggacagacttcagtctcacaatcagcggtctgcagcctgaagattttgcaacttactactgtcaacagacttacactacccctaggacgttcggccgagggaccacggtggagatcagacgaactgtggctgcaccatctgtcttcatcttcccgccatctgatgagcagttgaaatctggaactgcctctgttgtgtgcctgctgaataacttctatcccagagaggccaaagtacagtggaaggtggataacgccctccaatcgggtaactcccaggagagtgtcacagagcaggacagcaaggacagcacctacagcctcagcagcaccctgacgctgagcaaagcagactacgagaaacacaaagtctacgcctgcgaagtcacccatcagggcctgagctcgcccgtcacaaagagcttcaacaggggagagtgt

SEQ ID NO: 2521 - DNA, 651 bp, synthetic construct
  misc_feature 1..651: note = Synthetic polynucleotide encoding artificial human antibody VL chain
  source 1..651: mol_type = other DNA
ccgtctgtgctgacgcagccgccctcagtgtctggggccccaggacagagggtcaccatctcctgcactgggagcagctccaacatcggggcaggttatgatgtacactggtaccagcagcttccaggaacagcccccaaactcctcatctatggtaacatcaatcggccctcaggggtccctgaccgattctctggctccaagtctggcccctcagcctccctgaccatcactgggctccaggctgacgatgaggctgattattactgccagtcctatgacagccgcctgagtggtgtggtattcggcggggggaccaagctgaccgtcctaggtcagcccaaggctgccccctcggtcactctgttcccgccctcctctgaggagcttcaagccaacaaggccacactggtgtgtctcataagtgacttctacccgggagccgtgacagtggcctggaaggcagatagcagccccgtcaaggcgggagtggagaccaccacaccctccaaacaaagcaacaacaagtacgcggccagcagctatctgagcctgacgcctgagcagtggaagtcccacagaagctacagctgccaggtcacgcatgaagggagcaccgtggagaagacagtggcccctacagaatgttca

SEQ ID NO: 2522 - DNA, 642 bp, synthetic construct
  misc_feature 1..642: note = Synthetic polynucleotide encoding artificial human antibody VL chain
  source 1..642: mol_type = other DNA
gaaatagtgatgacgcagtctccagccaccctgtctgtgtctccaggggagagagccaccctctcctgcagggccagtcagagtgtgagcaccaacttagcctggtaccagcagagacctggccaggctcccaggctcttcatctttggtgcatccaccagggccactggtatcccagccaggttcagtggcagtgggtctgggacagagttcactctcaccatcagcagcccgcagcctgaagactctgcagtttattactgtcagcagtatactaccaggcctctcactttcggcggagggaccaaggtggagatcaaacgaactgtggctgcaccatctgtcttcatcttcccgccatctgatgagcagttgaaatctggaactgcctctgttgtgtgcctgctgaataacttctatcccagagaggccaaagtacagtggaaggtggataacgccctccaatcgggtaactcccaggagagtgtcacagagcaggacagcaaggacagcacctacagcctcagcagcaccctgacgctgagcaaagcagactacgagaaacacaaagtctacgcctgcgaagtcacccatcagggcctgagctcgcccgtcacaaagagcttcaacaggggagagtgt

SEQ ID NO: 2523 - DNA, 644 bp, synthetic construct
  misc_feature 1..644: note = Synthetic polynucleotide encoding artificial human antibody VL chain
  source 1..644: mol_type = other DNA
gcgaaattgtgttgacacagtctccagccaccttgtctttgtctccaggggaaggagccaccctctcctgcagggccagtcagagtgtgagtggctacttagcctggtaccaacagaaacctggccaggctcccaggctcctcatctatgacgcatccaacagggccactggcatccctgccaggttcagtggcagtgggtctgggacagacttcactctcaccatcagcagcctagagcctgaagattttgcagtttattactgtcaacagcggagcaagtggcctctcactttcggcggagggacccaggtggagatcaaacgaactgtggctgcaccatctgtcttcatcttcccgccatctgatgagcagttgaaatctggaactgcctctgttgtgtgcctgctgaataacttctatcccagagaggccaaagtacagtggaaggtggataacgccctccaatcgggtaactcccaggagagtgtcacagagcaggacagcaaggacagcacctacagcctcagcagcaccctgacgctgagcaaagcagactacgagaaacacaaactctacgcctgcgaagtcacccatcagggcctgagctcgcccgtcacaaagagcttcaacaggggagagtgt

SEQ ID NO: 2524 - DNA, 651 bp, synthetic construct
  misc_feature 1..651: note = Synthetic polynucleotide encoding artificial human antibody VL chain
  source 1..651: mol_type = other DNA
cagtctgtggtgactcaaccaccctcagcgtctgggccccccgggcagacagtcaccatctcttgttctggaggcaggtccaacgtcgccagtcatgctgtacattggtaccagcatctcccgggaacggcccccaaactcctcatctataatgatcatcagcggccctccggggtccctgaccgattctctggctccaagtctggcccttcagcctccctggccatcagtggcctccggtccgaagatgaggctgattattactgtgcaacatgggatgacagcctgggtggccgtgtggttttcggcggagggaccaaattgaccgtcctaggtcagcccaaggctgccccctcggtcactctgttcccgccctcctctgaggagcttcaagccaacaaggccacactggtgtgtctcataagtgacttctacccgggagccgtgacagtggcctggaaggcagatagcagccccgtcaaggcgggagtggagaccaccacaccctccaaacaaagcaacaacaagtacgcggccagcagctatctgagcctgacgcctgagcagtggaagtcccacagaagctacagctgccaggtcacgcatgaagggagcaccgtggagaagacagtggcccctacagaatgttca

SEQ ID NO: 2525 - DNA, 660 bp, synthetic construct
  misc_feature 1..660: note = Synthetic polynucleotide encoding artificial human antibody VL chain
  source 1..660: mol_type = other DNA
gatattgtgatgacccagactccactctccatgcccgtcacccctggagagccggcctccatctcctgcaggtctagtcagagcctcttggacagtgatgatggaaaaacctatttggactggtacctgcagaagccagggcagtctccacagctcctgatctatacggtttcctatcgggcctctggagtcccagacaggttcagtggcagtgggtcaggcactgatttcacactgaaaatcagcagggtggaggctgaggatgttggagtttattactgcatgcaacgtatagagtttcctttcactttcggccctgggaccaaagtggatatcaaacgaactgtggctgcaccatctgtcttcatcttcccgccatctgatgagcagttgaaatctggaactgcctctgttgtgtgcctgctgaataacttctatcccagagaggccaaagtacagtggaaggtggataacgccctccaatcgggtaactcccaggagagtgtcacagagcaggacagcaaggacagcacctacagcctcagcagcaccctgacgctgagcaaagcagactacgagaaacacaaagtctacgcctgcgaagtcacccatcagggcctgagctcgcccgtcacaaagagcttcaacaggggagagtgt

SEQ ID NO: 2526 - DNA, 319 bp, synthetic construct
  misc_feature 1..319: note = Synthetic polynucleotide encoding artificial human antibody VL chain
  source 1..319: mol_type = other DNA
tcctatgagctgactcagccaccctcagtgtccgtgtccccaggacagacagccagcatcacctgctctggagataaattgggggataaatatgcttgctggtatcagcagaagccaggccagtcccctgtgctggtcatctatcaagatagcaagcggccctcagggatccctgagcgattctctggctccaactctgggaacacagccactctgaccatcagcgggacccaggctatggatgaggctgactattactgtcaggcgtgggacagcagcactgcggtattcggcggagggaccaagctgaccgtcctag

SEQ ID NO: 2527 - DNA, 636 bp, synthetic construct
  misc_feature 1..636: note = Synthetic polynucleotide encoding artificial human antibody VL chain
  source 1..636: mol_type = other DNA
ccctatgaactgactcagccaccctcagtgtccgtgtccccaggacagacagccaacatcacctgttctggagataaattgggggatatatgtgtttgctggtatcagcagaagccaggccagtcccctgtgttggtcatctatcaacataacaagcggccctcagggatccctgagcgattctctggctccaactctggcaacacagccacgctgaccatcagcgcgacccaggctacggatgaggctatctattactgtcagtcgtgggacagtagttctgtgctattcggcggagggaccaagctgaccgtcctcggtcagcccaaggctgccccctcggtcactctgttcccgccctcctctgaggagcttcaagccaacaaggccacactggtgtgtctcataagtgacttctacccgggagccgtgacagtggcctggaaggcagatagcagccccgtcaaggcgggagtggagaccaccacaccctccaaacaaagcaacaacaagtacgcggccagcagctatctgagcctgacgcctgagcagtggaagtcccacagaagctacagctgccaggtcacgcatgaagggagcaccgtggagaagacagtggcccctacagaatgttca

SEQ ID NO: 2528 - DNA, 660 bp, synthetic construct
  misc_feature 1..660: note = Synthetic polynucleotide encoding artificial human antibody VL chain
  source 1..660: mol_type = other DNA
ggcatcgtgatgacccagtctccagactccctgggtgtgtctctgggcgagagggccaccatcaactgcaagtccagccagagtcttttctatagctccaacaataagaactacttagcttggtaccagcagaaaccagggcagcctcctaaactgctcatttactgggcatctacccgggaatccggggtccctgaccgattcagtggcagcgggtctgggacagatttcactctcaccatcagcagcctgcaggctgaagatgtggcagtttattactgtcagcaatattatggtcgtctattcactttcggccctgggaccaaagtggatatcagacgaactgtggctgcaccatctgtcttcatcttcccgccatctgatgagcagttgaaatctggaactgcctctgttgtgtgcctgctgaataacttctatcccagagaggccaaagtacagtggaaggtggataacgccctccaatcgggtaactcccaggagagtgtcacagagcaggacagcaaggacagcacctacagcctcagcagcaccctgacgctgagcaaagcagactacgagaaacacaaagtctacgcctgcgaagtcacccatcagggcctgagctcgcccgtcacaaagagcttcaacaggggagagtgt

SEQ ID NO: 2529 - DNA, 648 bp, synthetic construct
  misc_feature 1..648: note = Synthetic polynucleotide encoding artificial human antibody VL chain
  source 1..648: mol_type = other DNA
caaattgtgttgacacagtctccagccaccctgtctttgtctccaggggaaagagccaccctctcctgcagggccagtcagagtgttagcagctacttagcctggtaccaacagaaacctggccaggctcccaggctcctcatctatgatgcatccaacagggccactggcatcccagccaggttcagtggcggtgggtctgagacagacttcactctcaccatcagcagcctagagcctgaagattttgcagtttattactgtcagcagcgtagcaactggcctccgaggctccctttcggcggagggaccaaggtggagatcaaacgaactgtggctgcaccatctgtcttcatcttcccgccatctgatgagcagttgaaatctggaactgcctctgttgtgtgcctgctgaataacttctatcccagagaggccaaagtacagtggaaggtggataacgccctccaatcgggtaactcccaggagagtgtcacagagcaggacagcaaggacagcacctacagcctcagcagcaccctgacgctgagcaaagcagactacgagaaacacaaagtctacgcctgcgaagtcacccatcagggcctgagctcgcccgtcacaaagagcttcaacaggggagagtgt

SEQ ID NO: 2530 - DNA, 645 bp, synthetic construct
  misc_feature 1..645: note = Synthetic polynucleotide encoding artificial human antibody VL chain
  source 1..645: mol_type = other DNA
caaattgtgttgacacagtctccagccaccctgtctttgtctccaggggaaagagccaccctctcctgcagggccagtcagagtgttagcaactatttagcctggtaccaacagaaacctggccaggctcccaggctcctcatctatgatgcatccaacagggccactggcatcccagccaggttcagtggcagtgggtctgggacagacttcactctcaccatcagcagcctagagcctgaagattttgcagtttattactgtcagcagcgtagcaactggcctccgtacacttttggccaggggaccaagctggacatcaaacgaactgtggctgcaccatctgtcttcatcttcccgccatctgatgagcagttgaaatctggaactgcctctgttgtgtgcctgctgaataacttctatcccagagaggccaaagtacagtggaaggtggataacgccctccaatcgggtaactcccaggagagtgtcacagagcaggacagcaaggacagcacctacagcctcagcagcaccctgacgctgagcaaagcagactacgagaaacacaaagtctacgcctgcgaagtcacccatcagggcctgagctcgcccgtcacaaagagcttcaacaggggagagtgt

SEQ ID NO: 2531 - DNA, 657 bp, synthetic construct
  misc_feature 1..657: note = Synthetic polynucleotide encoding artificial human antibody VL chain
  source 1..657: mol_type = other DNA
gatattgtgatgactcagtctccactctccctgcccgtcacccctggagagccggcctccatctcctgcaggtctagtcagagcctcctacagagtaatggaaacaactatttggcttggtacctgcagaagccagggcagtctccacaactcctgatctatttgggttctaatcgggcctccggggtccctgacaggttcagtggcagtggatcaggcacagattttacactgaaaatcagcaaattggcggctgaggatgttggggtttattactgcatgcaagctctacaaactccgtacacttttggccaggggaccaagctggacatcaaacgaactgtggctgcaccatctgtcttcatcttcccgccatctgatgagcagttgaaatctggaactgcctctgttgtgtgcctgctgaataacttctatcccagagaggccaaagtacagtggaaggtggataacgccctccaatcgggtaactcccaggagagtgtcacagagcaggacagcaaggacagcacctacagcctcagcagcaccctgacgctgagcaaagcagactacgagaaacacaaagtctacgcctgcgaagtcacccatcagggcctgagctcgcccgtcacaaagagcttcaacaggggagagtgt

SEQ ID NO: 2532 - DNA, 642 bp, synthetic construct
  misc_feature 1..642: note = Synthetic polynucleotide encoding artificial human antibody VL chain
  source 1..642: mol_type = other DNA
gacatccagatgacccagtctccttccaccctgtctgcatctgtaggagacagagtcaccatcacttgccgggccagtcagagtattagtggctggttggcctggtatcagcagaagccagggaaagcccctcaactcctgatctatttggtgtctagtttagaaagtggggtcccgtcaaggtttagcggcagtggatctgggacagaattcactctcaccatcagcagcctgcagcctgatgattttgcaacttattactgccaacactatgatagttatattggaacgttcggccaagggaccaaggtggaaatcaaacgaactgtggctgcaccatctgtcttcatcttcccgccatctgatgagcagttgaaatctggaactgcctctgttgtgtgcctgctgaataacttctatcccagagaggccaaagtacagtggaaggtggataacgccctccaatcgggtaactcccaggagagtgtcacagagcaggacagcaaggacagcacctacagcctcagcagcaccctgacgctgagcaaagcagactacgagaaacacaaactctacgcctgcgaagtcacccatcagggcctgagctcgcccgtcacaaagagcttcaacaggggagagtgt

SEQ ID NO: 2533 - DNA, 648 bp, synthetic construct
  misc_feature 1..648: note = Synthetic polynucleotide encoding artificial human antibody VL chain
  source 1..648: mol_type = other DNA
cagtctgtgttgacgcagccgccctcagtgtctgcggccccaggacagaaggtcaccatctcctgctctggaggcagctccaacattggaaataattatgtatcctggtaccagcagctcccaggaacagcccccaaactcatcatttatgacaatgataaacgacccgcagggattcctgaccgattctctggctccaagtctggttcgtcagccaccctgggcatcaccggactccagaatggggacgaggccgagtattattgcggaacatgggatagcagtttgggtggcggagtgttcggcggagggaccaaggtgaccgtcctaggtcagcccaaggctgccccctcggtcactctgttcccgccctcctctgaggagcttcaagccaacaaggccacactggtgtgtctcataagtgacttctacccgggagccgtgacagtggcctggaaggcagatagcagccccgtcaaggcgggagtggagaccaccacaccctccaaacaaagcaacaacaagtacgcggccagcagctatctgagcctgacgcctgagcagtggaagtcccacagaagctacagctgccaggtcacgcatgaagggagcaccgtggagaagacagtggcccctacggaatgttca

SEQ ID NO: 2534 - DNA, 645 bp, synthetic construct; identical to SEQ ID NO: 2530
  misc_feature 1..645: note = Synthetic polynucleotide encoding artificial human antibody VL chain
  source 1..645: mol_type = other DNA

SEQ ID NO: 2535 - DNA, 337 bp, synthetic construct
  misc_feature 1..337: note = Synthetic polynucleotide encoding artificial human antibody VL chain
  source 1..337: mol_type = other DNA
ggaattgtgatgactcagtctccactctccctgcccgtcacccctggagagacggcctccatctcctgtaggtctagtcagagcctccttcgtcgtgatggaaacaactatttggagtggtacctgcagaaaccagggcagcctccacacctcctgatctatttgggttctattcgggcctccagagtccctgacaggttcagtggcactgggtcagggacagacttcacactgataatcagcagagtggaggctgacgatgttggcgtttattactgcatggaagctgaacaaactccggggacttttggccaggggaccaagctggagatcaaac

SEQ ID NO: 2536 - DNA, 648 bp, synthetic construct
  misc_feature 1..648: note = Synthetic polynucleotide encoding artificial human antibody VL chain
  source 1..648: mol_type = other DNA
cagtctgccctgactcagcctgcctccgtgtctgggtctcctggacagtcgatcaccatctcctgcactggaaccagcagtgacgttggtggttttaactatgtctcctggtaccaacaacacccaggcaaagcccccaaactcctgatttatgatgtcagtgagcggccctcaggggtttctagtcgcttctctggctccaagtctggcaacacggcctccctgaccatctctgggctccaggctgaggacgaggctgattattactgcagctcatatacaagcagcaccactgtgcttttcggcggagggaccaagctgaccgtcctaggtcagcccaaggctgccccctcggtcactctgttcccgccctcctctgaggagcttcaagccaacaaggccacactggtgtgtctcataagtgacttctacccgggagccgtgacagtggcctggaaggcagatagcagccccgtcaaggcgggagtggagaccaccacaccctccaaacaaagcaacaacaagtacgcggccagcagctacctgagcctgacgcctgagcagtggaagtcccacagaagctacagctgccaggtcacgcatgaagggagcaccgtggagaagacagtggcccctacagaatgttca

SEQ ID NO: 2537 - DNA, 660 bp, synthetic construct
  misc_feature 1..660: note = Synthetic polynucleotide encoding artificial human antibody VL chain
  source 1..660: mol_type = other DNA
ggggttgtgatgactcagtctccactctccctgcccgtcacccttggacagccggcctccatctcctgcaggtctagtcaaagcctcgtatacagtgatggaaacacctacttgaattggtttcagcagaggccaggccaatctccaaggcgcctaatttataaggtttctaaccgggactctggggtcccagacagattcagcggcagtgggtcaggcactgatttcacactgaaaatcagcagggtggaggctgaggatgttggggtttattactgcatgcaaggtacacactggcctccgatcaccttcggccaagggacacgactggagattaaacgaactgtggctgcaccatctgtcttcatcttcccgccatctgatgagcagttgaaatctggaactgcctctgttgtgtgcctgctgaataacttctatcccagagaggccaaagtacagtggaaggtggataacgccctccaatcgggtaactcccaggagagtgtcacagagcaggacagcaaggacagcacctacagcctcagcagcaccctgacgctgagcaaagcagactacgagaaacacaaagtctacgcctgcgaagtcacccatcagggcctgagctcgcccgtcacaaagagcttcaacaggggagagtgt

SEQ ID NO: 2538 - DNA, 642 bp, synthetic construct
  misc_feature 1..642: note = Synthetic polynucleotide encoding artificial human antibody VL chain
  source 1..642: mol_type = other DNA
gacatccagatgacccagtctccatcctccctgtctgcatctgtaggagacagagtcaccatcacttgccgggcaagtcagagtattagcagctatttaaattggtatcagcagaaaccagggaaagcccctaagctcctgatctatgctgcatccagtttgcaaagtggggtcccatcaaggttcagtggcagtggatctgggacagatttcactctcgccatcagcagtctgcaacctgaagattttgcaacttactactgtcaccagacttacagtacccggctcactttcggcggagggaccgaggtggagatcaaacgaactgtggctgcaccatctgtcttcatcttcccgccatctgatgagcagttgaaatctggaactgcctctgttgtgtgcctgctgaataacttctatcccagagaggccaaagtacagtggaaggtggataacgccctccaatcgggtaactcccaggagagtgtcacagagcaggacagcaaggacagcacctacagcctcagcagcaccctgacgctgagcaaagcagactacgagaaacacaaagtctacgcctgcgaagtcacccatcagggcctgagctcgcccgtcacaaagagcttcaacaggggagagtgt

SEQ ID NO: 2539 - DNA, 644 bp, synthetic construct
  misc_feature 1..644: note = Synthetic polynucleotide encoding artificial human antibody VL chain
  source 1..644: mol_type = other DNA
gtgacatccagatgacccagtctccatcctccctgtctgcatctgtaggagacagagtcaccatcacttgccaggcgagtcaggacattagcaactatttaaattggtatcagcagaaaccagggaaagcccctaagctcctgatctacgatgcatccaatttggaaacaggggtcccatcaaggttcagtggcagtggatctgggacagatttcactctcaccatcagcagcctgcagcctgaagattttgcaacatattactgtcaacagtatgataatctcccgctcactttcggcggagggaccaaggtggagatcaaacgaactgtggctgcaccatctgtcttcatcttcccgccatctgatgagcagttgaaatctggaactgcctctgttgtgtgcctgctgaataacttctatcccagagaggccaaagtacagtggaaggtggataacgccctccaatcgggtaactcccaggagagtgtcacagagcaggacagcaaggacagcacctacagcctcagcagcaccctgacgctgagcaaagcagactacgagaaacacaaagtctacgcctgcgaagtcacccatcagggcctgagctcgcccgtcacaaagagcttcaacaggggagagtgt

SEQ ID NO: 2540 - DNA, 642 bp, synthetic construct
  misc_feature 1..642: note = Synthetic polynucleotide encoding artificial human antibody VL chain
  source 1..642: mol_type = other DNA
tcctatgtgctgactcagccaccctcggtgtcagtggccccaggacagacggccaggattacctgtgggggaaacaacattggaagtaaaagtgtgcactggtaccagcagaagccaggccaggcccctgtgctggtcgtctatgatgatagcgaccggccctcagggatccctgagcgattctctggctccaactctgggaacacggccaccctgaccatcagcagggtcgaagccggggatgaggccgactattactgtcaggtgtgggatagcagtagtgatccttgggtgttcggcggagggaccaagctgaccgtcctaggtcagcccaaggctgccccctcggtcactctgttcccgccctcctctgaggagcttcaagccaacaaggccacactggtgtgtctcataagtgacttctacccgggagccgtgacagtggcctggaaggcagatagcagccccgtcaaggcgggagtggagaccaccacaccctccaaacaaagcaacaacaagtacgcggccagcagctacctgagcctgacgcctgagcagtggaagtcccacaaaagctacagctgccaggtcacgcatgaagggagcaccgtggagaagacagtggcccctacagaatgttca

SEQ ID NO: 2541 - DNA, 647 bp, synthetic construct
  misc_feature 1..647: note = Synthetic polynucleotide encoding artificial human antibody VL chain
  source 1..647: mol_type = other DNA
gtgacatccagttgacccagtctccatccttcctgtctgcatctgtaggagacagagtcaccatcacttgccgggccagtcaggtcattagcgattatgtagcctggtatcagcaaaaaccagggaaagcccctaagctcctgatctatgctgcatccactttgcaaagtggggtcccatctaggttcagcggcagtggatctgggacagaattcactctcacaatcagcagcctgcagtctgaagattttgcaacttattactgtcaacaactgaatagttaccctccggtcaccttcggccaagggacacgactggacattaaacgaactgtggctgcaccatctgtcttcatcttcccgccatctgatgagcagttgaaatctggaactgcctctgttgtgtgcctgctgaataacttctatcccagagaggccaaagtacagtggaaggtggataacgccctccaatcgggtaactcccaggagagtgtcacagagcaggacagcaaggacagcacctacagcctcagcagcaccctgacgctgagcaaagcagactacgagaaacacaaagtctacgcctgcgaagtcacccatcagggcctgagctcgcccgtcacaaagagcttcaacaggggagagtgt

SEQ ID NO: 2542 - DNA, 644 bp, synthetic construct
  misc_feature 1..644: note = Synthetic polynucleotide encoding artificial human antibody VL chain
  source 1..644: mol_type = other DNA
gtgacatccagatgacccagtctccatcctccctgtctgcatctgtaggagacagagtcaccatcacttgccgggcaagtcagagcattagcacttatttaaattggtatcagcagaaaccagggaaagcccctaagctcctgatctatgttgcatccagtttgcaaagtggggtcccatcaaggttcagtggcagtggatctgggacagatttcactctcacaatcagcggtctgcaacctgaagattttgcaacttactactgtcaacagagttacagtaccccgtacacttttggccaggggaccaagctggagatcaaacgaactgtggctgcaccatctgtcttcatcttcccgccatctgatgagcagttgaaatctggaactgcctctgttgtgtgcctgctgaataacttctatcccagagaggccaaagtacagtggaaggtggataacgccctccaatcgggtaactcccaggagagtgtcacagagcaggacagcaaggacagcacctacagcctcagcagcaccctgacgctgagcaaagcagactacgagaaacacaaagtctacgcctgcgaagtcacccatcagggcctgagctcgcccgtcacaaagagcttcaacaggggagagtgt

SEQ ID NO: 2543 - DNA, 647 bp, synthetic construct
  misc_feature 1..647: note = Synthetic polynucleotide encoding artificial human antibody VL chain
  source 1..647: mol_type = other DNA
gtgacatccagatgacccagtctccttccaccctgtctgcatctgtaggagacagagtcaccatcacttgccgggccagtcagagaattagtaactggttggcctggtatcagcagacaccagggaaagcccctaagctcctgatctataaggcgtccagtttagaaagtggggtcccatcaaggttcagcggcagtggatctgggacagaattcactctcaccatcagcagcctgcagcctgatgattttgcaacttattactgccaacagtatagtagttcttctccaagaacgttcggccaagggaccaaggtggaaatcaaacgaactgtggctgcaccatctgtcttcatcttcccgccatctgatgagcagttgaaatctggaactgcctctgttgtgtgcctgctgaataacttctatcccagagaggccaaagtacagtggaaggtggataacgccctccaatcgggtaactcccaggagagtgtcacagagcaggacagcaaggacagcacctacagcctcagcagcaccctgacgctgagcaaagcagactacgagaaacacaaagtctacgcctgcgaagtcacccatcagggcctgagctcgcccgtcacaaagagcttcaacaggggagagtgt

SEQ ID NO: 2544 - DNA, 337 bp, synthetic construct
  misc_feature 1..337: note = Synthetic polynucleotide encoding artificial human antibody VL chain
  source 1..337: mol_type = other DNA
gatattttgatgacccagactccactctctctgtccgtcacccctggacagccggcctccatctcctgcaagtctagtcagagcctcctgaatcctgatggaaagacctatttgtattggtacctgcagaagtcaggccagcctccacagctcctgatctatgaactttccaaccgcttctctggagtgccagataggttcagtggcagcgggtcagggacagatttcacactgaagatcagccgggtggaggctgaggatattggagtttatttctgcatgcaaagtttacaacttccgattaccttcggccaagggacacgactggagattaaac

SEQ ID NO: 2545 - DNA, 647 bp, synthetic construct
  misc_feature 1..647: note = Synthetic polynucleotide encoding artificial human antibody VL chain
  source 1..647: mol_type = other DNA
gtgacatccagatgacccagtctccatcctccctgtctgcatctgtaggagacagagtcaccatcacttgccgggcaagtcagagcattagcggctatttaaattggtatcagcagaaaccagggaaagcccctaagctcctgatctatgctgcatccagtttgcaaagtggggtcccatcaaggttcagtggcagtggatctgggacagatttcactctcaccatcagcagtctgcaacctgaagattttgcaacttactactgtcaacagagttacagtacccgtttactcactttcggccctgggaccaaagtggatatcaaacgaactgtggctgcaccatctgtcttcatcttcccgccatctgatgagcagttgaaatctggaactgcctctgttgtgtgcctgctgaataacttctatcccagagaggccaaagtacagtggaaggtggataacgccctccaatcgggtaactcccaggagagtgtcacagagcaggacagcaaggacagcacctacagcctcagcagcaccctgacgctgagcaaagcagactacgagaaacacaaagtctacgcctgcgaagtcacccatcagggcctgagctcgcccgtcacaaagagcttcaacaggggagagtgt

SEQ ID NO: 2546 - DNA, 651 bp, synthetic construct
  misc_feature 1..651: note = Synthetic polynucleotide encoding artificial human antibody VL chain
  source 1..651: mol_type = other DNA
cagtctgtgctgacgcagccgccctcagtgtctggggccccagggcagagggtcaccatctcctgcactgggagtagctccaacgtcggggcagattatgatgtgcactggtaccagcagcttccaggaacagcccccaaactcctcatctatggtaacagaaatcggccctcaggggtccctgaccgattctctggctccaagtctggcacctcagcctccctggccatcactgggctccaggctgaggatgaggctgattattactgccagtcctttgacagcagcctgagaggttatgtcttcggaactgggaccaaggtcaccgtcctaggtcagcccaaggccaaccccactgtcactctgttcccgccctcctctgaggagctccaagccaacaaggccacactagtgtgtctgatcagtgacttctacccgggagctgtgacagtggcctggaaggcagatggcagccccgtcaaggcgggagtggagaccaccaaaccctccaaacagagcaacaacaagtacgcggccagcagctacctgagcctgacgcccgagcagtggaagtcccacagaagctacagctgccaggtcacgcatgaagggagcaccgtggagaagacagtggcccctacagaatgttca

SEQ ID NO: 2547 - DNA, 648 bp, synthetic construct
  misc_feature 1..648: note = Synthetic polynucleotide encoding artificial human antibody VL chain
  source 1..648: mol_type = other DNA
gaaattgtattgacccagtctccagacaccctgtctttgtctccaggggaaagagccaccctctcctgcagggccagtcagagtgttagcagctccttagcctggtaccaacagaaacctggccaggctccccgactcctcatctattatgcatccaacagggccactgacatcccagccaggttcagtggcagtgggtctgggacagacttcactctcaccatcagcagcctagagcctgaagattttgcactttattactgtcagcaccgtatcacctggcctcccctgatcaccttcggccaagggacacgactggagattaaacgaactgtggctgcaccatctgtcttcatcttcccgccatctgatgagcagttgaaatctggaactgcctctgttgtgtgcctgctgaataacttctatcccagagaggccaaagtacagtggaaggtggataacgccctccaatcgggtaactcccaggagagtgtcacagagcaggacagcaaggacagcacctacagcctcagcagcaccctgacgctgagcaaagcagactacgagaaacacaaagtctacgcctgcgaagtcacccatcagggcctgagctcgcccgtcacaaagagcttcaacaggggagagtgt

SEQ ID NO: 2548 - DNA, 645 bp, synthetic construct
  misc_feature 1..645: note = Synthetic polynucleotide encoding artificial human antibody VL chain
  source 1..645: mol_type = other DNA
gaaattgtgttgacgcagtctccaggcaccctgtctttgtctccaggggaaagagccaccctctcctgcagggccagtcagagttttgacggcaagtccttagcctggtaccagcagaaacctggccagactccccgcctcctcgtctatggcgcgtccagcagggccactggcatcccagacaggttcggtggcagtgggtctgggacagacttcactctcaccatcagcagactggagtctgaagattttgcagtgtatttctgtcagcaatatgcttatgtaccgatcaccttcggccaagggacacgactggagcgtaaacgaactgtggctgcaccatctgtcttcatcttcccgccatctgatgagcagttgaaatctggaactgcctctgttgtgtgcctgctgaataacttctatcccagagaggccaaagtacagtggaaggtggataacgccctccaatcgggtaactcccaggagagtgtcacagagcaggacagcaaggacagcacctacagcctcagcagcaccctgacgctgagcaaagcagactacgagaaacacaaagtctacgcctgcgaagtcacccatcagggcctgagctcgcccgtcacaaagagcttcaacaggggagagtgt

SEQ ID NO: 2549 - DNA, 660 bp, synthetic construct
  misc_feature 1..660: note = Synthetic polynucleotide encoding artificial human antibody VL chain
  source 1..660: mol_type = other DNA
ggcatcgtgatgacccagtctccagactccctggctgtgtctctgggcgagagggccaccatcaactgcaagtccagccagagtattttatacagctccaacaataaggactccttagcttggtaccagcagaaaccaggacagcctcctaaacttctcatttcctcggcatctacccggcaatccggggtccctgaccgattcagtggcagcgggtctgggacagatttcaccctcaccatcagcagcctacaggctgaagatgtggcagtttattactgtcagcaatattatagtattcccctcactttcggccctgggaccaaagtggatatcaaacgaactgtggctgcaccatctgtcttcatcttcccgccatctgatgagcagttgaaatctggaactgcctctgttgtgtgcctgctgaataacttctatcccagagaggccaaagtacagtggaaggtggataacgccctccaatcgggtaactcccaggagagtgtcacagagcaggacagcaaggacagcacctacagcctcagcagcaccctgacgctgagcaaagcagactacgagaaacacaaagtctacgcctgcgaagtcacccatcagggcctgagctcgcccgtcacaaagagcttcaacaggggagagtgg

SEQ ID NO: 2550 - DNA, 325 bp, synthetic construct
  misc_feature 1..325: note = Synthetic polynucleotide encoding artificial human antibody VL chain
  source 1..325: mol_type = other DNA
gaaattgtgttgacgcagtctccaggcaccctgtctttgtctctaggggaaagagccaccctctcctgcagggccagtcagagtgttagcggcagccacttagcctggtatcagcagaaacctggccaggctcccaggctcctcatctatgatgcatccagcagggccactggcatcccagacaggttcagtggcagtgggtctgggacagagttcactctcaccatcagcagactggagcctgaagattttgcagtgtattactgtcagcagtatggtagctcacccctgtggttcggccaagggaccaaggtggaaatcaaac

SEQ ID NO: 2551 - DNA, 648 bp, synthetic construct
  misc_feature 1..648: note = Synthetic polynucleotide encoding artificial human antibody VL chain
  source 1..648: mol_type = other DNA
cagtctgccctgactcagcctgcctccgtgtctgggtctcctggacagtcgatcaccatctcctgcactggaaccagcagtgacgttggtggttataactatgtctcctggtaccaacaacacccaggcaaagcccccaaactcatgatttatgatgtcagtaatcggccctcaggggtttctaatcgcttctctggctccaagtctggcaacacggcctccctgaccatctctgggctccaggctgaggacgaggctgattattactgcagctcatatacaagcagcagcactcaagtcttcggaactgggaccaaggtcaccgtcctaggtcagcccaaggccaaccccactgtcactctgttcccgccctcctctgaggagctccaagccaacaaggccacactagtgtgtctgatcagtgacttctacccgggagctgtgacagtggcctggaaggcagatggcagccccgtcaaggcgggagtggagaccaccaaaccctccaaacagagcaacaacaagtacgcggccagcagctacctgagcctgacgcccgagcagtggaagtcccacagaagctacagctgccaggtcacgcatgaagggagcaccgtggagaagacagtggcccctacagaatgttca

SEQ ID NO: 2552 - DNA, 642 bp, synthetic construct
  misc_feature 1..642: note = Synthetic polynucleotide encoding artificial human antibody VL chain
  source 1..642: mol_type = other DNA
ccctatgagctgacacagccaccctcggtgtcagtgtccccaggacaaacggccaggatcacctgctctggagatgcattgccaaaaaaatatgcttattggtaccagcagaagtcaggccaggcccctgtgctggtcatctatgaggacagcaaacgaccctccgggatccctgagagattctctggctccagctcagggacaatggccaccttgactatcagtggggcccaggtggaggatgaagctgactactactgttactcaacagacagcagtggtaatcatagggtgttcggcggagggaccaagctgaccgtcctaggtcagcccaaggctgccccctcggtcactctgttcccaccctcctctgaggagcttcaagccaacaaggccacactggtgtgtctcataagtgacttctacccgggagccgtgacagtggcctggaaggcagatagcagccccgtcaaggcgggagtggagaccaccacaccctccaaacaaagcaacaacaagtacgcggccagcagctacctgagcctgacgcctgagcagtggaagtcccacaaaagctacagctgccaggtcacgcatgaagggagcaccgtggagaagacagtggcccctacagaatgttca

SEQ ID NO: 2553 - DNA, 645 bp, synthetic construct
  misc_feature 1..645: note = Synthetic polynucleotide encoding artificial human antibody VL chain
  source 1..645: mol_type = other DNA
gaaatagtgatgacgcagtctccagccaccctgtctgtgtctccaggggaaacagccaccctctcctgcagggccagtcagagtgttagcagcaacttagcctggtaccagcagaaacctggccaggctcccaggctcctcatgtatggtgcatccaccagggccactagtgtcccagccaggttcagtggcagtgcgtctgggacagatttcactctcaccatcagcagcctgcagtctgaagattttgcactttattactgtcagcagtataataactggcctcagtacacttttggccaggggaccaagctggagatcaaacgaactgtggctgcaccatctgtcttcatcttcccgccatctgatgagcagttgaaatctggaactgcctctgttgtgtgcctgctgaataacttctatcccagagaggccaaagtacagtggaaggtggataacgccctccaatcgggtaactcccaggagagtgtcacagagcaggacagcaaggacagcacctacagcctcagcagcaccctgacgctgagcaaagcagactacgagaaacacaaagtctacgcctgcgaagtcacccatcagggcctgagctcgcccgtcacaaagagcttcaacaggggagagtgg

SEQ ID NO: 2554 - DNA, 651 bp, synthetic construct
  misc_feature 1..651: note = Synthetic polynucleotide encoding artificial human antibody VL chain
  source 1..651: mol_type = other DNA
gaaattgtgttgacgcagtctccaggcaccctgtctttgtctccaggggagagagccaccctctcctgcagggccagtcagagtgttagcagcagctacttagtctggtaccaacaaaaagctggccaggctcccaggctcctaatctatggtgcatccagcagggccactggcatctcagacaggttcagtggcagtgggtctgggacagacttcactctcaccatcagcagactggagcctgaagattttgcagtgtattactgtcagcactttcgtagctcacctcccacgtacacttttggccaggggaccaagctggagatcaaacgaactgtggctgcaccatctgtcttcatcttcccgccatctgatgagcagttgaaatctggaactgcctctgttgtgtgcctgctgaataacttctatcccagagaggccaaagtacagtggaaggtggataacgccctccaatcgggtaactcccaggagagtgtcacagagcaggacagcaaggacagcacctacagcctcagcagcaccctgacgctgagcaaagcagactacgagaaacacaaagtctacgcctgcgaagtcacccatcagggcctgagctcgcccgtcacaaagagcttcaacaggggagagtgt

SEQ ID NO: 2555 - DNA, 648 bp, synthetic construct
  misc_feature 1..648: note = Synthetic polynucleotide encoding artificial human antibody VL chain
  source 1..648: mol_type = other DNA
cagtctgccctgactcagcctgcctccgtgtctgggtctcctggacagtcgatcaccatctcctgcactggaaccagcagtgacgttggtctttataactttgtctcctggtatcaacaacacccaggcaaagcccccaaactcatgatttttgatgtcaataatcggccctcaggggtttctaatcgcttctctggctccaagtctgacaacacggcctccctgaccatctctggcctccaggctgaggacgaggctgattattactgcagctcatattcaaggaccaccactctcgtattcggcggagggaccaaggtgaccgtcctaggtcagcccaaggctgccccctcggtcactctgttcccgccctcctctgaggagcttcaagccaacaaggccacactggtgtgtctcataagtgacttctacccgggagccgtgacagtggcctggaaggcagatagcagccccatcaaggcgggagtggagaccaccacaccctccaaacaaagcaacaacaagtacgcggccagcagctatctgagcctgacgcctgagcagtggaagtcccacagaagctacagctgccaggtcacgcatgaagggagcaccgtggagaagacagtggcccctacagaatgttca

SEQ ID NO: 2556 - DNA, 654 bp, synthetic construct
  misc_feature 1..654: note = Synthetic polynucleotide encoding artificial human antibody VL chain
  source 1..654: mol_type = other DNA
ccagctgtactgacgcagccgccctcagtttctggggccccagggcagagggtcaccatctcctgcactgggagcaactccaacatcggggcaggttattatgtacactggtaccagcaccgtccaggagcagcccccaaacgcctcatctatgcagacagcgatcgcccctcaggagtccctgaccgattctctggctccaggtctggcacctcagcctccctggccatcactgggctccaggctgaggatgaggctgattattactgccagtcctatgacagcggcctgagtgctccttgggtgttcggcggagggaccaagttgaccgtcctaggtcagcccaaggctgccccctcggtcactctgttcccgccctcctctgaggagcttcaagccaacaaggccacactggtgtgtctcataagtgacttctacccgggagccgtgacagtggcctggaaggcagatagcagccccgtcaaggcgggagtggagaccaccacaccctccaaacaaagcaacaacaagtacgcggccagcagctacctgagcctgacgcctgagcagtggaagtcccacaaaagctacagctgccaggtcacgcatgaagggagcaccgtggagaagacagtggcccctacagaatgttca

SEQ ID NO: 2557 - DNA, 645 bp, synthetic construct
  misc_feature 1..645: note = Synthetic polynucleotide encoding artificial human antibody VL chain
  source 1..645: mol_type = other DNA
gaaattgtgctgacgcagtctccaggcaccctgtctttgtctccaggacaaagagccaccctctcctgtagggccagtcagagtgttaccagcagctacttagcctggtaccagcagaaacctggccaggctcccaggctcctcatctatgctgcatccagcagggccactggcaccccagacaggttcagtggcagtgggtctgggacagacttcactctcaccatcagcagactggagcctgaggattttgcagtgtattcctgtcagcaatatggtaactcacctcccactttcggcggagggaccaaggtggagatcaaacgaactgtggctgcaccatctgtcttcatcttcccgccatctgatgagcagttgaaatctggaactgcctctgttgtgtgcctgctgaataacttctatcccagagaggccaaagtacagtggaaggtggataacgccctccaatcgggtaactcccaggagagtgtcacagagcaggacagcaaggacagcacctacagcctcagcagcaccctgacgctgagcaaagcagactacgagaaacacaaagtctacgcctgcgaagtcacccatcagggcctgagctcgcccgtcacaaagagcttcaacaggggagagtgt

SEQ ID NO: 2558 - DNA, 331 bp, synthetic construct
  misc_feature 1..331: note = Synthetic polynucleotide encoding artificial human antibody VL chain
  source 1..331: mol_type = other DNA
ccgtctgtgctgactcagccactctcagcgtctgggacccccgggcagagggtcaccatctcttgttctggaagcagctccaacatcggagataattttgtttattggtatcagcaattcccgggaacggcccccaaagtcctcatctttaaaaataatcagcggccctcaggggtccctgaccgattcttcggctccaagtctggcacctcagcctccctggccatcagtggactccggtccgaggatgaggctgagtattactgtgcaacctgggatgacgacctgagtggtccggtcttcggcggagggaccaaggtgaccgtcctag

SEQ ID NO: 2559 - DNA, 322 bp, synthetic construct
  misc_feature 1..322: note = Synthetic polynucleotide encoding artificial human antibody VL chain
  source 1..322: mol_type = other DNA
gaaacgacactcatgcagtctccagcactcatatcagcgactccaggagacaaagtccacatctcctgcaaagccagccaagacattgacgatgatttgaattggtatcaacagaaaccaggagaagctcctattctcattattgaagaagcaactaatctcggtcctggattctcacctcgattcagtggcagcgggtatggaacagatttcaccctcacaatttatgacatagagtctggagatgctgcattttacttctgtctacaacatgatactttccctctgacgttcggccaagggaccaaagtggaaatcaaac

SEQ ID NO: 2560 - DNA, 644 bp, synthetic construct
  misc_feature 1..644: note = Synthetic polynucleotide encoding artificial human antibody VL chain
  source 1..644: mol_type = other DNA
gtgacatccagatgacccagtctccttccaccctgtctgcatctgtaggagacaaagtcaccatcacttgccgggccagtcagagtgttggtagctggttggcctggtatcagcaaaaaccagggaaagcccctaagctcctgatctctgtggcgtctagtttagaaagtggggtcccatcaaggttcagcggcagtggatctgggacagaattcactctcaccgtcagcagcctgcagcctgatgattttgcaacttattactgtcaacagtataatagttattcgtggacgttcggccaagggaccaaggtggagctcaaacgaactgtggctgcaccatctgtcttcatcttcccgccatctgatgagcagttgaaatctggaactgcctctgttgtgtgcctgctgaataacttctatcccagagaggccaaagtacagtggaaggtggataacgccctccaatcgggtaactcccaggagagtgtcacagagcaggacagcaaggacagcacctacagcctcagcagcaccctgacgctgagcaaagcagactacgagaaacacaaagtctacgcctgcgaagtcacccatcagggcctgagctcgcccgtcacaaagagcttcaacaggggagagtta

SEQ ID NO: 2561 - DNA, 644 bp, synthetic construct
  misc_feature 1..644: note = Synthetic polynucleotide encoding artificial human antibody VL chain
  source 1..644: mol_type = other DNA
gtgacatccagttgacccagtctccatccttcctgtctgcatctgtaggagacagagtcaccatcacttgccgggccagtcaggacattagcagttttttagcctggtatcagcaaaaaccagggaaagcccctgacctcctaatctatgctgcatccactttgcagagtggggtcccatcaaggttcagcggcagtggatctgggacagaattcactctcacaatcagtagcctgcagcctgaagattttgcagcttattactgtcaacaccttactagtttcccgtacacttttggccaggggaccaagctggagatcaaacgaactgtggctgcaccatctgtcttcatcttcccgccatctgatgagcagttgaaatctggaactgcctctgttgtgtgcctgctgaataacttctatcccagagaggccaaagtacagtggaaggtggataacgccctccaatcgggtaactcccaggagagtgtcacagagcaggacagcaaggacagcacctacagcctcagcagcaccctgacgctgagcaaagcagactacgagaaacacaaagtctacgcctgcgaagtcacccatcagggcctgagctcgcccgtcacaaagagcttcaacaggggagagtta

SEQ ID NO: 2562 - DNA, 645 bp, synthetic construct
  misc_feature 1..645: note = Synthetic polynucleotide encoding artificial human antibody VL chain
  source 1..645: mol_type = other DNA
gtttcttctgagctgactcaggaccctgctgtgtctgtggccttgggacagacagtcaggatcacatgccaaggagacagcctcagagactattctgctagctggtaccagcagaagccaggacaggcccctattcttgtcatctttttcagaaacaagcggccctctgggatcccagaccgattctctggctccgcctcaggaaacacagcttccttgaccatcactggggctcaggcggaagatgaggctgactattactgtggctcccgggacagtagtggtaacccttctgtcttcggagctgggaccaaggtcaccgtcctaggtcagcccaaggccaaccccactgtcactctgttcccgccctcctctgaggagctccaagccaacaaggccacactagtgtgtctgatcagtgacttctacccgggagctgtgacagtggcctggaaggcagatggcagccccgtcaaggcgggagtggagaccaccaaaccctccaaacagagcaacaacaagtacgcggccagcagctacctgagcctgacgcccgagcagtggaagtcccacagaagctacagctgccaggtcacgcatgaagggagcaccgtggagaagacagtggcccctacagaatgttca

SEQ ID NO: 2563 - DNA, 644 bp, synthetic construct
  misc_feature 1..644: note = Synthetic polynucleotide encoding artificial human antibody VL chain
  source 1..644: mol_type = other DNA
cagaaattgtgttgacacagtctccagccaccctgtctttgtctccaggggaaggagccaccctctcctgcagggccagtcagagtgttagcgcctacttaggctggtaccaacagaaacctggccaggctcccaggctcctcatctatgatacatccaacagggccactggcatcccagccaggttcagtggcagtgggtctgggacagacttcactctcaccatcagcagcctagagcctgaagattttgcagtttattactgtcagcagcgtagcaactggctgtacacttttggccaggggaccaagctggagatcaaacgaactgtggctgcaccatctgtcttcatcttcccgccatctgatgagcagttgaaatctggaactgcctctgttgtgtgcctgctgaataacttctatcccagagaggccaaagtacagtggaaggtggataacgccctccaatcgggtaactcccaggagagtgtcacagagcaggacagcaaggacagcacctacagcctcagcagcaccctgacgctgagcaaagcagactacgagaaacacaaagtctacgcctgcgaagtcacccatcagggcctgagctcgcccgtcacaaagagcttcaacaggggagagtgg

SEQ ID NO: 2564 - DNA, 645 bp, synthetic construct
  misc_feature 1..645: note = Synthetic polynucleotide encoding artificial human antibody VL chain
  source 1..645: mol_type = other DNA
tcctatgtgctgactcagccaccctcagtgtcagtggccccaggaaagacggccaggattacctgtgggggaaacaacattggaagtaaaagtgtgcactggtaccagcagaagccaggccaggcccctgtgctggtcatctattatgatagcgaccggccctcagggatccctgagcgattctctggctccaactctgggaacacggccaccctgaccatcagcagggtcgaagccggggatgaggccgactattactgtcaggtgtgggatagtagtagtgatcatcaagaggtattcggcggagggaccaagctgaccgtcctaggtcagcccaaggctgccccctcggtcactctgttcccgccctcctctgaggagcttcaagccaacaaggccacactggtgtgtctcataagtgacttctacccgggagccgtgacagtggcctggaaggcagatggcagccccgtcaaggcgggagtggagaccaccacaccctccaaacaaagcaacaacaagtacgcggccagcagctatctgagcctgacgcctgagcagtggaagtcccacagaagctacagctgccaggtcacgcatgaagggagcaccgtggagaagacagtggcccctacagaatgttca

SEQ ID NO: 2565 - DNA, 648 bp, synthetic construct
  misc_feature 1..648: note = Synthetic polynucleotide encoding artificial human antibody VL chain
  source 1..648: mol_type = other DNA
cagtctgccctgactcagcctgcctccgtgtctgggtctcctggacagtcgatcaccatctcctgcactggatccagcagtgatgttggaaattataaccttgtctcctggtaccaactacaccccggcaaagcccccaaactcatgatttatgaggtcattaagcggccctcaggagtttctagtcacttctctggctccaagtctggcaacacggcctccctgacaatctctgggctccaggctgaggacgaggctgattattactgctgctcatatgcacctagtaacacttatgtcttcggaactgggaccagggtcaccgtcctaggtcagcccaaggccaaccccactgtcactctgttcccgccctcctctgaggagctccaagccaacaaggccacactagtgtgtctgatcagtgacttctacccgggagctgtgacagtggcctggaaggcagatggcagccccgtcaaggcgggagtggagaccaccaaaccctccaaacagagcaacaacaagtacgcggccagcagctacctgagcctgacgcccgagcagtggaagtcccacagaagctacagctgccaggtcacgcatgaagggagcaccgtggagaagacagtggcccctacagaatgttca

SEQ ID NO: 2566 - DNA, 642 bp, synthetic construct
  misc_feature 1..642: note = Synthetic polynucleotide encoding artificial human antibody VL chain
  source 1..642: mol_type = other DNA
cagattgtgttgacacagtctccagccaccctgtctttgtctccaggggaaagagtcaccctctcctgcagggccagtcagagtgtcagaagccacttagcctggtaccagcagaaacctggccaggctcccaggctcctcatgtatgatgcattcaatagggccactggcaccccagccaggttcagtggcagtgggtctgggacagacttcactctcaccattagcagcctagagcctgaagattttgcaatttattactgtcagcagcgtagcaactggcctctcactttcggcggagggaccaaggtggagatcaaacgaactgtggctgcaccatctgtcttcatcttcccgccatctgatgagcagttgaaatctggaactgcctctgttgtgtgcctgctgaataacttctatcccagagaggccaaagtacagtggaaggtggataacgccctccaatcgggtaactcccaggagagtgtcacagagcaggacagcaaggacagcacctacagcctcagcagcaccctgacgctgagcaaagcagactacgagaaacacaaagtctacgcctgcgaagtcacccatcagggcctgagctcgcccgtcacaaagagcttcaacaggggagagtta

SEQ ID NO: 2567 - DNA, 648 bp, synthetic construct
  misc_feature 1..648: note = Synthetic polynucleotide encoding artificial human antibody VL chain
  source 1..648: mol_type = other DNA
gtttcttctgagctgactcaagaccctgctgtgtctgtggccttgggacagacagtccggatcacatgccaaggagacagcctcagaagttattatgcaacctggtaccagcagaagccaggacaggcccctctacttgtcatatttgataaagacaaacggccctcagggatcccagaccgattctccggctccagctcaggaaacacagcttccttgaccatcactggggctcagccggaagatgaggctgtctattactgtaactcccgagacagcagtgctcatgaccatctgttattcggcggagggaccacgctgaccgtcctgggtcagcccaaggctgccccctcggtcactctgttcccgccctcctctgaggagcttcaagccaacaaggccacactggtgtgtctcataagtgacttctacccgggagccgtgacagtggcctggaaggcagatagcagccccgtcaaggcgggagtggagaccaccacaccctccaaacaaagcaacaacaagtacgcggccagcagctacctgagcctgacgcctgagcagtggaagtcccacagaagctacagctgccaggtcacgcatgaagggagcaccgtggagaagacagtggcccctacagaatgttca

SEQ ID NO: 2568 - DNA, 648 bp, synthetic construct
  misc_feature 1..648: note = Synthetic polynucleotide encoding artificial human antibody VL chain
  source 1..648: mol_type = other DNA
gaagttgttttgacgcagtctccaggcaccctgtctttgtctccaggtgagagagccaccctcttctgcaaggccagtcaggctattgtcagcaattacttagtctggtatcagcagaaacctggcctggctcccagactcctcatctacagtgcttccaccagggccactggcattccagacaggttcagtggcggtggctctggaacagacttcagtctcaccatcagcggactggaacctgaagattttgcagtttattactgtcaacactttggtgactcacccttgtacatttttggccaggggaccaaggtggagatcaaacgaactgtggctgcaccatctgtcttcatcttcccgccatctgatgagcagttgaaatctggaactgcctctgttgtgtgcctgctgaataacttctatcccagagaggccaaagtacagtggaaggtggataacgccctccaatcgggtaactcccaggagagtgtcacagagcaggacagcaaggacagcacctacagcctcagcagcaccctgacgctgagcaaagcagactacgagaaacacaaagtctacgcctgcgaagtcacccatcagggcctgagctcgcccgtcacaaagagcttcaacaggggagagtgt

SEQ ID NO: 2569 - DNA, 636 bp, synthetic construct
  misc_feature 1..636: note = Synthetic polynucleotide encoding artificial human antibody VL chain
  source 1..636: mol_type = other DNA
ccctatgagctgactcagccactctcagtgtcggtggccctgggacagacggccagggttacctgtgggggaacgaacattggaaagaaagatgttcattggtaccaacaaaagccaggccaggcccctgtgttggtcatttatagggatgacaaccggccctctgggatccctgagcgattctctggcctcaattcggggcacacggccaccttgaccatcagcagagcccaggccggggatgaggctgattattactgtcaggtgtgggacagcagtactgcggtgttcggcggagggaccaagctgaccgtcctcggtcagcccaaggctgccccctcggtcactctgttcccgccctcctctgaggagcttcaagccaacaaggccacactggtgtgtctcataagtgacttctacccgggagccgtgacagtggcctggaaggcagatagcagccccgtcaaggcgggagtggagaccaccacaccctccaaacaaagcaacaacaagtacgcggccagcagctacctgagcctgacgcctgagcagtggaagtcccacagaagctacagctgccaggtcacgcatgaagggagcaccgtggagaagacagtggcccctacagaatgttca

SEQ ID NO: 2570 - DNA, 325 bp, synthetic construct
  misc_feature 1..325: note = Synthetic polynucleotide encoding artificial human antibody VL chain
  source 1..325: mol_type = other DNA
ctctatgtgctgactcagccaccctcagtgtcagtggccccaggaaagacggccaggattacctgtgggggaaacaacattggaagtaaaagtgtgcactggtaccagcagaagccaggccaggcccctgtgctggtcatctatgatgatagcgaccggccctcagggatccctgagcgattctctggctccaactctgggaacacggccaccctgaccatcagcagggtcgaagccggggatgaggccgactattactgtcaggtgtgggatagtagtagtgatcatgtggtattcggcggagggaccaagctgaccgtccagg

SEQ ID NO: 2571 - DNA, 642 bp, synthetic construct
  misc_feature 1..642: note = Synthetic polynucleotide encoding artificial human antibody VL chain
  source 1..642: mol_type = other DNA
tcctatgagctgacacagacaccctcggtgtcagtgtccccaggacagacggccaggatcacctgctctggagatgcattgccaaagcaatctgttaattggtaccagcagaggccaggccaggcccctgtggtggtgatatgtaaagacactgagaggccctcagggatccctgagcgattctctggctccacctcagggacaacagtcacgttgaccatcggtggagtccaggcagaagatgaggctgactattactgtcaatcagcagacagcagtggtttttatgtggtattcggcggagggaccaagctgaccgtcctaggtcagcccaaggctgccccctcggtcactctgttcccaccctcctctgaggagcttcaagccaacaaggccacactggtgtgtctcataagtgacttctacccgggagccgtgacagtggcctggaaggcagatagcagccccgtcaaggcgggagtggagaccaccacaccctccaaacaaagcaacaacaagtacgcggccagcagctacctgagcctgacgcctgagcagtggaagtcccacaaaagctacagctgccaggtcacgcatgaagggagcaccgtggagaagacagtggcccctacagaatgttca

SEQ ID NO: 2572 - DNA, 636 bp, synthetic construct
  misc_feature 1..636: note = Synthetic polynucleotide encoding artificial human antibody VL chain
  source 1..636: mol_type = other DNA
tcctatgagctgacacagccaccctcggtgtcagtgtccccaggacagacggccaggatcacctgctctggagatgcattgccaaagcaatatgcttattggtaccagcagaagccaggccaggcccctgtgctggtgatatataaagacagtgagaggccctcagggatccctgagcgattctctggctccagctcagggacaacagtcacgttgaccatcagtggagtccaggcagaagacgaggctgactattactgtcaatcagcagacagcagtagtcccgtgtttggcggagggaccaagctgaccgtcctaggtcagcccaaggctgccccctcggtcactctgttcccaccctcctctgaggagcttcaagccaacaaggccacactggtgtgtctcataagtgacttctacccgggagccgtgacagtggcctggaaggcagatagcagccccgtcaaggcgggagtggagaccaccacaccctccaaacaaagcaacaacaagtacgcggccagcagctacctgagcctgacgcctgagcagtggaagtcccacagaagctacagctgccaggtcacgcatgaagggagcaccgtggagaagacagtggcccctacagaatgttca

SEQ ID NO: 2573 - DNA, 639 bp, synthetic construct
  misc_feature 1..639: note = Synthetic polynucleotide encoding artificial human antibody VL chain
  source 1..639: mol_type = other DNA
tcctatgagctgacacagccaccctcggtgtcagtgcccccaggacaaacggccaggatcacctgctctggagatgcattgccaaaaaaatatgcttattggtaccagcagaagtcaggccaggcccctgtgctggtcatctatgaggacaccaaacgaccctccgggatccctgacagattctctggctccagctcagggacaatggccaccttgactatcagtggggcccaggtggaggatgatgctgactactactgttactcaacagacagtagggctaccggggttttcggcggagggaccaagctgaccgtcctaggtcagcccaaggctgccccctcggtcactctgttcccgccctcctctgaggagcttcaagccaacaaggccacactggtgtgtctcataagtgacttctacccgggagccgtgacagtggcctggaaggcagatagcagccccgtcaaggcgggagtggagaccaccacaccctccaaacaaagcaacaacaagtacgcggccagcagctacctgagcctgacgcctgagcagtggaagtcccacagaagctacagctgccaggtcacgcatgaagggagcaccgtggagaagacagtggcccctacagaatgttca

SEQ ID NO: 2574 - DNA, 642 bp, synthetic construct
  misc_feature 1..642: note = Synthetic polynucleotide encoding artificial human antibody VL chain
  source 1..642: mol_type = other DNA
gccgtccagatgacccagtctccatcctccctgtctgcatctgtgggagacagagtcaccatctcttgccgggcaagtcagaccattgacacctatttaaactggtatcaacagagaccaggaaaagcccctcagctcctgatctatgctgcatccagtttgcaaagtggggtcccttcaaggttcagtgccagtggatctgggacacatttcactctcatcatcaacagtctgcaacctgaagactttgcaacttactactgtcaacagagttacagtacccctcagacgttcggccaagggaccaaggtggaaatcaaacgaactgtggctgcaccatctgtcttcatcttcccgccatctgatgagcagttgaaatctggaactgcctctgttgtgtgcctgctgaataacttctatcccagagaggccaaagtacagtggaaggtggataacgccctccaatcgggtaactcccaggagagtgtcacagagcaggacagcaaggacagcacctacagcctcagcagcaccctgacgctgagcaaagcagactacgagaaacacaaagtctacgcctgcgaagtcacccatcagggcctgagctcgcccgtcacaaagagcttcaacaggggagagtgt

SEQ ID NO: 2575 - DNA, 324 bp, synthetic construct
  misc_feature 1..324: note = Synthetic polynucleotide encoding artificial human antibody VL chain
  source 1..324: mol_type = other DNA
gtgacatccagatgacccagtctccatcctccctgtctgcttctgtaggagacagagtcaccatcacttgccaggcgactcagggcattaccaactatttaaattggtatcagcaaaaaccagggaaagcccctaaggtcctgatctacgatgcatccaatttggaaacaggggtcccatcaaggttcagtggaaatggatctgggacacattttactttcaccatcagcagcctgcagcctgaagatatcgcaacatattactgtcaacagtatgaaaatctcccgctcactttcggcggagggaccaaggtggagatcaaac

SEQ ID NO: 2576 - DNA, 644 bp, synthetic construct
  misc_feature 1..644: note = Synthetic polynucleotide encoding artificial human antibody VL chain
  source 1..644: mol_type = other DNA
gtgacatccagatgacccagtctccatcctccctgtctgcatctgtaggagacagagtcaccatcacttgccaggcgagtcaggacattagcacgtttttaaattggtatcagcagaaaccagggaaagcccctaagctcctgatctacgatgaatccaatttggaaacaggggtcccgtcaaggttcagtggaagtggatctgggacagattttactttcaccatcagcagcctgcagcctgaagatattgcaacatattactgtcaacagtttgataatctcccgctcactttcggcggagggaccaggttggagatcaaacgaactgtggctgcaccatctgtcttcatcttcccgccatctgatgagcagttgaaatctggaactgcctctgttgtgtgcctgctgaataacttctatcccagagaggccaaagtacagtggaaggtggataacgccctccaatcgggtaactcccaggagagtgtcacagagcaggacagcaaggacagcacctacagcctcagcagcaccctgacgctgagcaaagcagactacgagaaacacaaagtctacgcctgcgaagtcacccatcagggcctgagctcgcccgtcacaaagagcttcaacaggggagagtgt

SEQ ID NO: 2577 - DNA, 331 bp, synthetic construct
  misc_feature 1..331: note = Synthetic polynucleotide encoding artificial human antibody VL chain
  source 1..331: mol_type = other DNA
cagtctgccctgactcagcctcgctcagtgtccgggtctcctggacagtcagtcaccatctcctgcactggaaccagcagtgatattggtggttataactatgtctcctggtaccaacaacacccaggcaaagcccccaaatttgtgatttatgatgtcagtcagcggccctcaggggtccctgatcgcttctctggctccaagtctggcaacacggcctccctgaccatctctgggctccaggctgacgatgaggctgattattactgctcctcatatgcaggcagctacacttgggtgttcggcggagggaccaaggtgatcgtcctag

SEQ ID NO: 2578 - DNA, 317 bp, synthetic construct
  misc_feature 1..317: note = Synthetic polynucleotide encoding artificial human antibody VL chain
  source 1..317: mol_type = other DNA
tcctatgagctgactcagccaccctcagtgtccgtgtccccaggacagacagccagcatcacctgctctggagataaattgggggataaatatgcttgctggtatcagcagaagccaggccagtcccctgtggtggtcatctatcaagataccaagcggccctcagggatccctgagcgattctctggctccaactctgggaacacagccactctgaccatcagcgggacccaggctatggatgaggctgactattactgtcaggcgtgggacagcagcactgtggtatttggcggagggaccaagctgaccgtcct

SEQ ID NO: 2579 - DNA, 331 bp, synthetic construct
  misc_feature 1..331: note = Synthetic polynucleotide encoding artificial human antibody VL chain
  source 1..331: mol_type = other DNA
ccgtctgtgttgacgcagccgccctcactgtctgcggccccaggacagagggtcaccatctcctgctctggaagcacctccaacattggaaataattttgtatcctggtaccagcagctcccaggagcagcccccaaactcctcatttatgacaatgataagcgaccctcagagattcctgaccgattctctggctccaagtctggcacgtcagccaccctggccatcaccggactccagactggggacgaggccgattattattgcggaacatgggatagcagcctgggtgcttatgtcttcggaactgggaccaaggtcaccgtcctgg

SEQ ID NO: 2580 - DNA, 644 bp, synthetic construct
  misc_feature 1..644: note = Synthetic polynucleotide encoding artificial human antibody VL chain
  source 1..644: mol_type = other DNA
gagaaattgtgttgacgcagtctccaggcacactgtctttgtctccaggggaaagagccaccctctcctgcagggccagtcagagtatcagcagcacctacttagtctggtaccagcagaaacctggccaggctcccaggctcctcatctatgctgcgtcctatagggccactggcatcccagacaggttcagtggcagtgggtctgggacagacttcattctcaccatcagcagactggagcctgaagattttgcagtatattactgtcagcagtatggtagctcactcactttcggcggagggaccaaggtggagatcaaacgaactgtggctgcaccatctgtcttcatcttcccgccatctgatgagcagttgaaatctggaactgcctctgttgtgtgcctgctgaataacttctatcccagagaggccaaagtacagtggaaggtggataacgccctccaatcgggtaactcccaggagagtgtcacagagcaggacagcaaggacagcacctacagcctcagcagcaccctgacgctgagcaaagcagactacgagaaacacaaagtctacgcctgcgaagtcacccatcagggcctgagctcgcccgtcacaaagagcttcaacaggggagagtgt

SEQ ID NO: 2581 - DNA, 647 bp, synthetic construct
  misc_feature 1..647: note = Synthetic polynucleotide encoding artificial human antibody VL chain
  source 1..647: mol_type = other DNA
gagaaattgagttgacgcagtctccaggcaccctgtctttgtctccaggggaaagagccaccctctcctgcagggccagtcagagtgttagcagcagctacttagcctggtaccagcagaaacctggccaggctcccaggctcctcatctatggtgcatccagcagggccactggcatcccagacaggttcagtggcagtgggtctgggacagacttcactctcaccatcagcagactggagcctgaagattttgcagtgtattactgtcagcagtatggtagctcacctctcactttcggcggagggaccaaggtggagatcaaacgaactgtggctgcaccatctgtcttcatcttcccgccatctgatgagcagttgaaatctggaactgcctctgttgtgtgcctgctgaataacttctatcccagagaggccaaagtacagtggaaggtggataacgccctccaatcgggtaactcccaggagagtgtcacagagcaggacagcaaggacagcacctacagcctcagcagcaccctgacgctgagcaaagcagactacgagaaacacaaactctacgcctgcgaagtcacccatcagggcctgagctcgcccgtcacaaagagcttcaacaggggagagtgt

SEQ ID NO: 2582 - DNA, 648 bp, synthetic construct
  misc_feature 1..648: note = Synthetic polynucleotide encoding artificial human antibody VL chain
  source 1..648: mol_type = other DNA
gcctctgccctgactcagcctgcctccgtgtctgggtctcctggacagtcgatcaccatctcctgcaatggaagcagcagtgacgttggcgattataactatgtctcctggtaccaacaacacccaggcaaagcccccaaactcatgatttatgacgtcagtaatcggccctcaggggtttctaatcgcttctctggctccaagtctggcaacacggcctccctgaccatctctgggctccaggctgaggacgaggctgattattactgcagctcatatacaagcagcaggagtctggtgttcggcggagggaccaagctgaccgtcctaggtcagcccaaggctgccccctcggtcactctgttcccgccctcctctgaggagcttcaagccaacaaggccacactggtgtgtctcataagtgacttctacccgggagccgtgacagtggcctggaaggcagatagcagccccgtcaaggcgggagtggagaccaccacaccctccaaacaaagcaacaacaagtacgcggccagcagctatctgagcctgacgcctgagcagtggaagtcccacagaagctacagctgccaggtcacgcatgaagggagcaccgtggagaagacagtggcccctacagaatgttca

SEQ ID NO: 2583 - DNA, 644 bp, synthetic construct
  misc_feature 1..644: note = Synthetic polynucleotide encoding artificial human antibody VL chain
  source 1..644: mol_type = other DNA
gtgacatccagatgacccagtctccatcctccctgtctgcatctgtaggagacaaagtcaccatgacctgccgggcaagtcagttcattagcgtctatgtaaattggtatcagcagaaaccagggaaagcccctaagctcctgatctatactgcgtcctctttggaaagtggggtctcatcaaggttcagtggcggcggatctgggacagatttcactctcacgatccgcagtctgcaacctgaagattttgcaatttactactgtcaacagacttacagcaccccgtggacgttcggcccagggacgagggtagaaattaaacgaactgtggctgcaccatctgtcttcatcttcccgccatctgatgagcagttgaaatctggaactgcctctgttgtgtgcctgctgaataacttctatcccagagaggccaaagtacagtggaaggtggataacgccctccaatcgggtaactcccaggagagtgtcacagagcaggacagcaaggacagcacctacagcctcagcagcaccctgacgctgagcaaagcagactacgagaaacacaaagtctacgcctgcgaagtcacccatcagggcctgagctcgcccgtcacaaagagcttcaacaggggagagtgt

SEQ ID NO: 2584 - DNA, 642 bp, synthetic construct
  misc_feature 1..642: note = Synthetic polynucleotide encoding artificial human antibody VL chain
  source 1..642: mol_type = other DNA
ggagaagtagtgatgacgcagtctccagccacgctgtctgtgtctccaggggaaagagccaccctctcctgcagggccagtcagagtgttagcagcaaggtagcctggtaccagcagagacctggccgggctcccaggctcctcatctatggtgcatccaccagggccactgatatcccagccaggttcagtggcagtgggtctgggacagagttcactctcaccatcagcagcctgcagtctgaagattttgcagtttattactgtcaacaatataataattggctcactttcggcggagggaccaaggtggaaatcaagcgaactgtggctgcaccatctgtcttcatcttcccgccatctgatgagcagttgaaatctggaactgcctctgttgtgtgcctgctgaataacttctatcccagagaggccaaagtacagtggaaggtggataacgccctccaatcgggtaactcccaggagagtgtcacagagcaggacagcaaggacagcacctacagcctcagcagcaccctgacgctgagcaaagcagactacgagaaacacaaagtctacgcctgcgaagtcacccatcagggcctgagctcgcccgtcacaaagagcttcaacaggggagagtgg

SEQ ID NO: 2585 - DNA, 319 bp, synthetic construct
  misc_feature 1..319: note = Synthetic polynucleotide encoding artificial human antibody VL chain
  source 1..319: mol_type = other DNA
tcctatgagctgacacagccatcctcagtgtcagtgtctccgggacagacagccaggatcacctgctcaggagatgtattggcaaaaaattatgctcggtggttccagcagaagccaggccaggcccctctgttggtgatttataaagacaatattcggccctcagggatccctgagcgattctccggctccagctcagggaccacagtcaccttgaccatcagcggggcccacgttgacgatgaggctgactattactgttactctacgcctgacaacaatggggtgttcggcggagggaccaagctgatcgtcctag

SEQ ID NO: 2586 - DNA, 648 bp, synthetic construct
  misc_feature 1..648: note = Synthetic polynucleotide encoding artificial human antibody VL chain
  source 1..648: mol_type = other DNA
cagtctgccctgactcagcctgcctccgtgtctgggtctcctggacagtcgatcaccatctcctgcactgggaccagcagtgacgttggtgcttatccgtatgtctcctggtatcaacatcacccaggcagagcccccaaactcacgatttttgatgtcattaatcggccctcaggggtttctaatcgcttctctggctccaagtctggcaacacggcctccctgaccatctctgggctccaggctgaggacgaggctttttattactgcagctcatatacaacctccaacagtgtggtgttcggcggagggaccaaactgaccgtcctgagtcagcccaaggctgccccctcggtcactctgttcccgccctcctctgaggagcttcaagccaacaaggccacactggtgtgtctcataagtgacttctacccgggagccgtgacagtggcctggaaggcagatagcagccccgtcaaggcgggagtggagaccaccacaccctccaaacaaagcaacaacaagtacgcggccagcagctatctgagcctgacgcctgagcagtggaagtcccacagaagctacagctgccaggtcacgcatgaagggagcaccgtggagaagacagtggcccctacagaatgttca

SEQ ID NO: 2587 - DNA, 647 bp, synthetic construct
  misc_feature 1..647: note = Synthetic polynucleotide encoding artificial human antibody VL chain
  source 1..647: mol_type = other DNA
gagaaattgtgttgacacagtctccaggcaccctgtctttgtctccaggggaaagagccaccctctcctgcagggccagtcagagtttaagcagcggttacttagcctggtaccagcagaaacctggccaggctcccaggctcctcatctatggtgcatcctacagggccactgacatcccagacaggttcagtggcagtgggtctgggacagacttcactctcaccatcagcagactggagcctgaagatttcgcagtgtattactgtcagcagtatgataactcacctctcactttcggcggagggaccaaggtggagatcaaacgaactgtggctgcaccatctgtcttcatcttcccgccatctgatgagcagttgaaatctggaactgcctctgttgtgtgcctgctgaataacttctatcccagagaggccaaagtacagtggaaggtggataacgccctccaatcgggtaactcccaggagagtgtcacagagcaggacagcaaggacagcacctacagcctcagcagcaccctgacgctgagcaaagcagactacgagaaacacaaagtctacgcctgcgaagtcacccatcagggcctgagctcgcccgtcacaaagagcttcaacaggggagagtgt

SEQ ID NO: 2588 - DNA, 340 bp, synthetic construct
  misc_feature 1..340: note = Synthetic polynucleotide encoding artificial human antibody VL chain
  source 1..340: mol_type = other DNA
gggatcgtgatgacccagtctccagactccctggctgtgtctctgggcgagagggccaccatcaactgcaagtccagccagagtcttttatacaggtccaacgataagaactacttcgcttggtaccagcagaaaccaggacagcctcctaaactgctcatttactgggcgtctacccgggaatccggggtccctgaccgattcagtggcagcgggtcagggacagatttcactctcaccatcagcagcctgcaggctgaagatgtggcagtttattactgtcagcaatattggggtactccgtacacttttggccaggggaccaagctggagatcaaac

SEQ ID NO: 2589 - DNA, 648 bp, synthetic construct
  misc_feature 1..648: note = Synthetic polynucleotide encoding artificial human antibody VL chain
  source 1..648: mol_type = other DNA
ccggctgtactgacgcaggcgccctcagtgtctggggccccagggcagagggtcaccatctcctgtactgggagcggctccaatatcggggctggttatgatgcacactggtatcaacaacttccaggaacagcccccaaactcctcatctatcgtaacaccaatcggccctctggggtccctgaccgattctctggctccaagtctggctcctcagcctccctggccatcactgggctccagcctgaggatgaggctgaatattattgtcagtcctatgacagtggcctgggggtggtattcggcggagggaccaaactgaccgtcctaggtcagcccaaggctgccccctcggtcactctgttcccgccctcctctgaggagcttcaagccaacaaggccacactggtgtgtctcataagtgacttctacccgggagccgtgacagtggcctggaaggcagatagcagccccgtcaaggcgggagtggagaccaccacaccctccaaacaaagcaacaacaagtacgcggccagcagctatctgagcctgacgcctgagcagtggaagtcccacagaagctacagctgccaggtcacgcatgaagggagcaccgtggagaagacagtggcccctacagaatgttca

SEQ ID NO: 2590 - DNA, 648 bp, synthetic construct
  misc_feature 1..648: note = Synthetic polynucleotide encoding artificial human antibody VL chain
  source 1..648: mol_type = other DNA
cagtctgccctgactcagcctccctccgcgtccgggtctcctggacagtcagtcaccatctcctgcactggaaccagcagtgacgttggtggttatgaccatgtctcctggtaccaacagcacccaggcaaagcccccaaagtcatgatttatgaggtcactaagcggccctcaggggtccctgatcgcttctctggctccaagtctggcaacacggcctccctgaccgtctctgggctccaggctgaggatgaggctgaatattactgcagctcatatgcaggcatcaacaatttggtttttggcggagggaccaagctgaccgtcctaggtcagcccaaggctgccccctcggtcactctgttcccgccctcctctgaggagcttcaagccaacaaggccacactggtgtgtctcataagtgacttctacccgggagccgtgacagtggcctggaaggcagatagcagccccgtcaaggcgggagtggagaccaccacaccctccaaacaaagcaacaacaagtacgcggccagcagctatctgagcctgacgcctgagcagtggaagtcccacagaagctacagctgccaggtcacgcatgaagggagcaccgtggagaagacagtggcccctacagaatgttca

SEQ ID NO: 2591 - DNA, 644 bp, synthetic construct
  misc_feature 1..644: note = Synthetic polynucleotide encoding artificial human antibody VL chain
  source 1..644: mol_type = other DNA
gtgacatccagatgacccagtctccttccaccctgtctgcatctgtaggcgacagagtcaccatcacttgccgggccagtcagagtattagtagctggttggcctggtatcagcagaaaccagggaaagcccctaagctcctgatctataaggcgtctagtttagaaagtggggtcccatcaaggttcagcggcagtggatctgggacagagttcactctcaccatcagcagcctgcagcctgatgattttgcaacttattactgccaacagtataatagttattctcagacgttcggccaagggaccaaggtggaaatcaaacgaactgtggctgcaccatctgtcttcatcttcccgccatctgatgagcagttgaaatctggaactgcctctgttgtgtgcctgctgaataacttctatcccagagaggccaaagtacagtggaaggtggataacgccctccaatcgggtaactcccaggagagtgtcacagagcaggacagcaaggacagcacctacagcctcagcagcaccctgacgctgagcaaagcagactacgagaaacacaaagtctacgcctgcgaagtcacccatcagggcctgagctcgcccgtcacaaagagcttcaacaggggagagtgt

SEQ ID NO: 2592 - DNA, 642 bp, synthetic construct
  misc_feature 1..642: note = Synthetic polynucleotide encoding artificial human antibody VL chain
  source 1..642: mol_type = other DNA
gaaatagtgatgacgcagtcgccagccaccctgtctgtgtctcccggcgaaagagccaccctctcctgcagggccagtcagagtattgtcaccaacttagcctggtttcagcagaaacctgcccaggctcccaggctcctcatctatggtgcatccaccagggccactgatgtcccagccagattcagtggcagtgggtctgggacagagttcactctcaccgtcagcagcctgcagtctgaagattttgcaatttatttctgtcagcagtatactgactggccgtacacttttggccaggggaccaagctggagatcaaacgaactgtggctgcaccatctgtcttcatcttcccgccatctgatgagcagttgaaatctggaactgcctctgttgtgtgcctgctgaataacttctatcccagagaggccaaagtacagtggaaggtggataacgccctccaatcgggtaactcccaggagagtgtcacagagcaggacagcaaggacagcacctacagcctcagcagcaccctgacgctgagcaaagcagactacgagaaacacaaagtctacgcctgcgaagtcacccatcagggcctgagctcgcccgtcacaaagagcttcaacaggggagagtgt

SEQ ID NO: 2593 - DNA, 648 bp, synthetic construct
  misc_feature 1..648: note = Synthetic polynucleotide encoding artificial human antibody VL chain
  source 1..648: mol_type = other DNA
ccccttgtgctgactcaatcgccctctgcctctgcctccctgggagcctcggtcaagctcacctgcactctgagtagtgggcacagcacctacgccatcgcatggcatcagcagcggccagagaagggccctcggtacttgatgaagcttaacagtgatggcagccacatcaagggggacgggatccctgctcgcttctcaggcgccagctctggggttgaccgctacctcatcatctccagttcacagtctgaggatgaggctgactattactgtcagacctggggcactgttggcgtgttcggcggagggaccaagctgaccgtcctaggtcagcccaaggctgccccctcggtcactctgttcccgccctcctctgaggagcttcaagccaacaaggccacactggtgtgtctcataagtgacttctacccgggagccgtgacagtggcctggaaggcagatagcagccccgtcaaggcgggagtggagaccaccacaccctccaaacaaagcaacaacaagtacgcggccagcagctacctgagcctgacgcctgagcagtggaagtcccacaaaagctacagctgccaggtcacgcatgaagggagcaccgtggagaagacagtggcccctacagaatgttca

SEQ ID NO: 2594 - DNA, 645 bp, synthetic construct
  misc_feature 1..645: note = Synthetic polynucleotide encoding artificial human antibody VL chain
  source 1..645: mol_type = other DNA
gaaattgtgttgacgcagtctccaggcaccctgtctttgtctccaggggaaagagccaccctctcctgcagggccggtcagagtgttagcagcagctacttagcctggtaccagcagaaacctggccaggctcccaggctcctcatctatggtgcatccagcagggccactggcatcccagacaggttcagtggcagtgggtctgggacagacttcactctcaccatcagcagactggagcctgaagattttgcagtgtattactgtcagcagtatggtagctcaccgtggacgttcggccaagggaccaaggtggaaatcaaacgaactgtggctgcaccatctgtcttcatcttcccgccatctgatgagcagttgaaatctggaactgcctctgttgtgtgcctgctgaataacttctatcccagagaggccaaagtacagtggaaggtggataacgccctccaatcgggtaactcccaggagagtgtcacagagcaggacagcaaggacagcacctacagcctcagcagcaccctgacgctgagcaaagcagactacgagaaacacaaagtctacgcctgcgaagtcacccatcagggcctgagctcgcccgtcacaaagagcttcaacaggggagagtgt

SEQ ID NO: 2595 - DNA, 651 bp, synthetic construct
  misc_feature 1..651: note = Synthetic polynucleotide encoding artificial human antibody VL chain
  source 1..651: mol_type = other DNA
cagtctgtgctgacgcagccgccctcagtgtctggggccccagggcagagggtcaccatcccctgcactgggagcagctccaacctcggggcaggttatgctgtacactggtaccagcagcttccagcaacaacccccaaactcctcatctatgctaacagcagtcgaccctcaggggtccctgaccgattctctggctccaggtctgacacctcagcctccctggccatcactgggctccaggctgaggatgaggctgattattactgccagtcttatgacagcagcctgagtggttatgtcttcggaactgggacctgggtcaccgtcctaagtcagcccaaggccaaccccactgtcactctgttcccgccctcctctgaggagctccaagccaacaaggccacactagtgtgtctgatcagtgacttctacccgggagctgtgacagtggcctggaaggcagatggcagccccgtcaaggcgggagtggagaccaccaaaccctccaaacagagcaacaacaagtacgcggccagcagctacctgagcctgacgcccgagcagtggaagtcccacagaagctacagctgccaggtcacgcatgaagggagcaccgtggagaagacagtggcccctacagaatgttca

SEQ ID NO: 2596 - DNA, 651 bp, synthetic construct
  misc_feature 1..651: note = Synthetic polynucleotide encoding artificial human antibody VL chain
  source 1..651: mol_type = other DNA
cagtctgtgttgacgcagccgccctcagtgtctggggccccaggccagaggatcaccatctcctgcactggaggcagcaccaacatcgggacaatttatgatgttcactggtaccaacagcttcccggagcagcccccaaactcctcatctatggtaacagtcgtcgaccctcaggggtccctgaccgattctctgcctccaagtctggcacctcagcctccctggccatcagtgggctccggcctgaggatgaggcggattattactgccagtgttttgacaccagcctgactgcaaaggtgttcggcggagggaccaagctgaccgtcctaggtcagcccaaggctgccccctcggtcactctgttcccgccctcctctgaggagcttcaagccaacaaggccacactggtgtgtctcataagtgacttctacccgggagccgtgacagtggcctggaaggcagatagcagccccgtcaaggcgggagtggagaccaccacaccctccaaacaaagcaacaacaagtacgcggccagcagctatctgagcctgacgcctgagcagtggaagtcccacagaagctacagctgccaggtcacgcatgaagggagcaccgtggagaagacagtggcccctacagaatgttca

SEQ ID NO: 2597 - DNA, 337 bp, synthetic construct
  misc_feature 1..337: note = Synthetic polynucleotide encoding artificial human antibody VL chain
  source 1..337: mol_type = other DNA
gatattctgctgactcagtctccactcttcctgtccgtcacccctggagagccggcctccatctcctgcaggtctaatcagagcctcctttctagtaatggacatcatcttttggattggtacttccaaaaaccaggccagtctcctcaactcctgatgtttctgggttctactcgggcctccggggtccctgacaggttcagtggcagtgcatcaggcacagaatttacactgaaaatcagcacagtggaggcggaagattttggagtgtattactgcatgcaagctctacaagttcctcggacgttcggccgagggaccaaggtggaaatcaaac

SEQ ID NO: 2598 - DNA, 644 bp, synthetic construct
  misc_feature 1..644: note = Synthetic polynucleotide encoding artificial human antibody VL chain
  source 1..644: mol_type = other DNA
gtgacatccagttgacccagtctccatccttcctgtctgcatctgtaggagacagagtcaccatcacttgccgggccagtcagggcattagcagttatttagcctggtatcagcaaaaaccagggaaagcccctaagctcctgatctatgctgcatccactttgcaaagtggggtcccatcacggttcagcggcagtggatctgggacagaattcactctcacaatcagcagcctgcagcctgaagattttgcaacttattactgtcaacaacttaatagttacccgctcactttcggcggagggaccaaggtggagatcaaacgaactgtggctgcaccatctgtcttcatcttcccgccatctgatgagcagttgaaatctggaactgcctctgttgtgtgcctgctgaataacttctatcccagagaggccaaagtacagtggaaggtggataacgccctccaatcgggtaactcccaggagagtgtcacagagcaggacagcaaggacagcacctacagcctcagcagcaccctgacgctgagcaaagcagactacgagaaacacaaactctacgcctgcgaagtcacccatcagggcctgagctcgcccgtcacaaagagcttcaacaggggagagtta

SEQ ID NO: 2599 - DNA, 648 bp, synthetic construct
  misc_feature 1..648: note = Synthetic polynucleotide encoding artificial human antibody VL chain
  source 1..648: mol_type = other DNA
ccggctgtgctgactcagccaccctcagcgtctgggacccccgggcagagggtcaccatctcttgttctggaagcaactccaacatcggaagtacttttgtatactggtaccagcagctcccaggaacggcccccaaactcctcatccatagtaataatcagcggccctcaggggtccctgaccgagtctctggctccaagtctggcacctcagcctccctggccatcagtgggctccggtccgaggatgaggctgattattactgtgcagcatgggatgacagcctgagtggtccggtgttcggcggagggaccaagctgaccgtcctaggtcagcccaaggctgccccctcggtcactctgttcccaccctcctctgaggagcttcaagccaacaaggccacactggtgtgtctcataagtgacttctacccgggagccgtgacagtggcctggaaggcagatagcagccccgtcaaggcgggagtggagaccaccacaccctccaaacaaagcaacaacaagtacgcggccagcagctacctgagcctgacgcctgagcagtggaagtcccacaaaagctacagctgccaggtcacgcatgaagggagcaccgtggagaagacagtggcccctacagaatgttca

SEQ ID NO: 2600 - DNA, 657 bp, synthetic construct
  misc_feature 1..657: note = Synthetic polynucleotide encoding artificial human antibody VL chain
  source 1..657: mol_type = other DNA
gatattgtgttgactcagtctccactctccctgcccgtcacccctggagagccggcctccatctcctgcaggtctagtcagagcctcctgcatagtaatggagtctactacttggattggtacctgctgaagccaggacagtctccacaactcgtgatctatatgggttcgagtcgggcctccggggtccctgacaggttcagtggcagtggatcaggcacggattttagactgaaaatcagcagagtggaggctgaggatgttggaatttattactgcatgcaagctctgcaaactccgtggacgttcggccaagggaccaaggtggaaatcaaacgaactgtggctgcaccatctgtcttcatcttcccgccatctgatgagcagttgaaatctggaactgcctctgttgtgtgcctgctgaataacttctatcccagagaggccaaagtacagtggaaggtggataacgccctccaatcgggtaactcccaggagagtgtcacagagcaggacagcaaggacagcacctacagcctcagcagcaccctgacgctgagcaaagcagactacgagaaacacaaagtctacgcctgcgaagtcacccatcagggcctgagctcgcccgtcacaaagagcttcaacaggggagagtgg

SEQ ID NO: 2601 - DNA, 648 bp, synthetic construct
  misc_feature 1..648: note = Synthetic polynucleotide encoding artificial human antibody VL chain
  source 1..648: mol_type = other DNA
gtttcttctgagctgactcaggaccctgctgtgtctgtggccttgggacagacagtcaggatcacatgccaaggagacagcctcagaagctattttgcaacctggtatcagcagaagccaggacaggcccctgttcttgtcatctatggtaaaaacagccggccctcagggatcccagaccgattctctggctccacctcaggaaacacagcttccttgaccatctctggggctcaggcggaagatgaggctgactattactgtaactcccgggacagcagtgatgaccatctggaagtattcggcggagggaccaagctgaccgtcctaggtcagcccaaggctgccccctcggtcactctgttcccgccctcctctgaggagcttcaagccaacaaggccacactggtgtgtctcataagtgacttctacccgggagccgtgacagtggcctggaaggcagatagcagccccgtcaaggcgggagtggagaccaccacaccctccaaacaaagcaacaacaagtacgcggccagcagctatctgagcctgacgcctgagcagtggaagtcccacagaagctacagctgccaggtcacgcatgaagggagcaccgtggagaagacagtggcccctacagaatgttca

SEQ ID NO: 2602 - DNA, 644 bp, synthetic construct
  misc_feature 1..644: note = Synthetic polynucleotide encoding artificial human antibody VL chain
  source 1..644: mol_type = other DNA
gttacatccagatgacccagtctccttccaccctgtctgcatctgtaggagacagagtcaccatcacttgccgggccagtcagagtataagtagttggttggcctggtttcagcagaaaccagggaaagcccctaaactcctgatctataaggcgtctactttagaaagtggggtcccatcaagattcagcggcagtgaatctgggacagaattcactctcaccatcggcagcctgcagcctgatgattttgcaacttattactgtcaacagtataatagttacccgaggacgttcggccaagggaccaaggtggatatcaaacgaactgtggctgcaccatctgtcttcatcttcccgccatctgatgagcagttgaaatctggaactgcctctgttgtgtgcctgctgaataacttctatcccagagaggccaaagtacagtggaaggtggataacgccctccaatcgggtaactcccaggagagtgtcacagagcaggacagcaaggacagcacctacagcctcagcagcaccctgacgctgagcaaagcagactacgagaaacacaaagtctacgcctgcgaagtcacccatcagggcctgagctcgcccgtcacaaagagcttcaacaggggagagtgt

SEQ ID NO: 2603 - DNA, 662 bp, synthetic construct
  misc_feature 1..662: note = Synthetic polynucleotide encoding artificial human antibody VL chain
  source 1..662: mol_type = other DNA
gtgacatcgtgatgacccagtctccagactccctggctgtgactctgggcgagagggccaccatcaactgtaggtccagccagactgttttatacgactccaacaataaaaactacttagcttggtatcagcagaaaccaggacagcctcctaaactactcatttactgggcgtctattcgggaatctggggtccctgaccgattcagtggcagcgggtctgggacagatttcactctcaccatcaacaccctgcaggctgaagatgtggcaatttatttctgtcagcaatattttactactcctcgcacgttcggccaagggaccaaggtggaaatcaaacgaactgtggctgcaccatctgtcttcatcttcccgccatctgatgagcagttgaaatctggaactgcctctgttgtgtgcctgctgaataacttctatcccagagaggccaaagtacagtggaaggtggataacgccctccaatcgggtaactcccaggagagtgtcacagagcaggacagcaaggacagcacctacagcctcagcagcaccctgacgctgagcaaagcagactacgagaaacacaaagtctacgcctgcgaagtcacccatcagggcctgagctcgcccgtcacaaagagcttcaacaggggagagtta

SEQ ID NO: 2604 - DNA, 651 bp, synthetic construct
  misc_feature 1..651: note = Synthetic polynucleotide encoding artificial human antibody VL chain
  source 1..651: mol_type = other DNA
cccgctgtgctgactcagccaccctcagtgtctgggacccccgggcagagggtcaccatctcttgttctggaggcagcagcaacatcggaggtaagtatgtatactggtaccagcaactcccaggaacggcccccaaggttgtcatctacaggaataatcagcggccctcaggagtctctgaccgattctctggctccaagtctggcatttcagcctccctgaccatcagtgggctccggtccgaggatgaggctgtttattactgtgcagcatgggatgacggcctgggtggcctttatgtgttcggaactgggaccaaggtcaccgccctaggtcagcccaaggccaaccccactgtcactctgttcccgccctcctctgaggagctccaagccaacaaggccacactagtgtgtctgatcagtgacttctacccgggagctgtgacagtggcctggaaggcagatggcagccccgtcaaggcgggagtggagaccaccaaaccctccaaacagagcaacaacaagtacgcggccagcagctacctgagcctgacgcccgagcagtggaagtcccacagaagctacagctgccaggtcacgcatgaagggagcaccgtggagaagacagtggcccctacagaatgttca

SEQ ID NO: 2605 - DNA, 639 bp, synthetic construct
  misc_feature 1..639: note = Synthetic polynucleotide encoding artificial human antibody VL chain
  source 1..639: mol_type = other DNA
gacatccagatgacccagtctccttccaccctgtctgcatctgtaggagacagagtcaccatctcttgccgggccagtcagagtattagtgactggttggcctggtatcagcagaagccagggaaagcccctaagctcctgatctatgctgcatccattttacaaagtggggtcccatcaagattcagcggcagtggatctgggacagaattcactctcaccatcagcagcctgcagaccgatgattttgcaacttattactgccaacagtataatagggggtccactttcggccctgggaccaaagtggatatcaaacgaactgtggctgcaccatctgtcttcatcttcccgccatctgatgagcagttgaaatctggaactgcctctgttgtgtgcctgctgaataacttctatcccagagaggccaaagtacagtggaaggtggataacgccctccaatcgggtaactcccaggagagtgtcacagagcaggacagcaaggacagcacctacagcctcagcagcaccctgacgctgagcaaagcagactacgagaaacacaaagtctacgcctgcgaagtcacccatcagggcctgagctcgcccgtcacaaagagcttcaacaggggagagtgg

SEQ ID NO: 2606 - DNA, 642 bp, synthetic construct
  misc_feature 1..642: note = Synthetic polynucleotide encoding artificial human antibody VL chain
  source 1..642: mol_type = other DNA
tcctatgtgctgcctcagccaccctcagtgtcagtggccccaggacagacggccaaaatcacctgtgggggaaacaaccctggaattaagagtgtgcactggtaccagcagaggccaggccaggcccccgtgctggtcatctatgacgatagcgaccggccctcagggatccctgagcgattctctggctccaactctgggaacacggtcaccctgaccatcagctgggtcgaagccggggatgaggccgactattactgtcaggtgtgggacaggaatagtcatcgtgtgattttcggcggagggaccaagctgaccgtcctaggtcagcccaaggctgccccctcggtcactctgttcccgccctcctctgaggagcttcaagccaacaaggccacactggtgtgtctcataagtgacttctacccgggagccgtgacagtggcctggaaggcagatagcagccccgtcaaggcgggagtggagaccaccacaccctccaaacaaagcaacaacaagtacgcggccagcagctatctgagcctgacgcctgagcagtggaagtcccacagaagctacagctgccaggtcacgcatgaagggagcaccgtggagaagacagtggcccctacagaatgttca

SEQ ID NO: 2607 - DNA, 651 bp, synthetic construct
  misc_feature 1..651: note = Synthetic polynucleotide encoding artificial human antibody VL chain
  source 1..651: mol_type = other DNA
ccctctgtgctgacgcagccgccctcagtgtctggggccccggggcagagggtcaccatctcctgcactgggagcacctccaacatcggggcagattatgatgtacactggtaccaacaacttccaagaacagcccccaaactcctcatctatgctaacaacaatcggccctcaggggtccctgaccggttctctggctccaagtctggcacctcagcctccctggccatcactgggctccaggctgaggatgaggctgattattactgccagtcctatgacaacagtctgagtgcttgggtgttcggcggagggaccaagttgaccgtcctaggtcagcccaaggctgccccctcggtcactctgttcccaccctcctctgaggagcttcaagccaacaaggccacactggtgtgtctcataagtgacttctacccgggagccgtgacagtggcctggaaggcagatagcagccccgtcaaggcgggagtggagaccaccacaccctccaaacaaagcaacaacaagtacgcggccagcagctacctgagcctgacgcctgagcagtggaagtcccacaaaagctacagctgccaggtcacgcatgaagggagcaccgtggagaagacagtggcccctacagaatgttca

SEQ ID NO: 2608 - DNA, 642 bp, synthetic construct
  misc_feature 1..642: note = Synthetic polynucleotide encoding artificial human antibody VL chain
  source 1..642: mol_type = other DNA
tcttctgagctgactcaggaccctgctgtgtctgtggccttgggacagacagtcaggatcacatgccaaggagacagcctcagaagcttttatggaagctggtaccagcagaagccaggacaggcccctgtacttgtcatctatggtgaaaacaaccggccctcagggatcccagaccgattctctggctccagctcaggaaacacagcttccttgaccatcactggggctcaggcggaagatgaggctgactattactgtaactcccgggacagcagtggtaaccattgggtgttcggcggagggaccaagctgaccgtcctaggtcagcccaaggctgccccctcggtcactctgttcccaccctcctctgaggagcttcaagccaacaaggccacactggtgtgtctcataagtgacttctacccgggagccgtgacagtggcctggaaggcagatagcagccccgtcaaggcgggagtggagaccaccacaccctccaaacaaagcaacaacaagtacgcggccagcagctacctgagcctgacgcctgagcagtggaagtcccacaaaagctacagctgccaggtcacgcatgaagggagcaccgtggagaagacagtggcccctacagaatgttca

SEQ ID NO: 2609 - DNA, 651 bp, synthetic construct
  misc_feature 1..651: note = Synthetic polynucleotide encoding artificial human antibody VL chain
  source 1..651: mol_type = other DNA
cagtctgccctgactcagcctgcctccgtgtctgggtctcctggacagtcgatcaccatctcctgcactggaatcagcagtgacgttgatggttataattatgtctcctggtaccaactctactcaggtaaagcccccaaactcataatttatgatgtcactaatcggccctcaggggtttctcatcgcttctctggctccaagtctggcaacacggcctccctgaccatctctgggctccaggctgaggacgaggctgattactactgcagctcatatataaggagcagcactcctgtggtattcggcggagggaccaagctgaccgtcctaggtcagcccaaggctgccccctcggtcactctgttcccgccctcctctgaggagcttcaagccaacaaggccacactggtgtgtctcataagtgacttctacccgggagccgtgacagtggcctggaaggcagatagcagccccgtcaaggcgggagtggagaccaccacaccctccaaacaaagcaacaacaagtacgcggccagcagctatctgagcctgacgcctgagcagtggaagtcccacagaagctacagctgccaggtcacgcatgaagggagcaccgtggagaagacagtggcccctacagaatgttca

SEQ ID NO: 2610 - DNA, 662 bp, synthetic construct
  misc_feature 1..662: note = Synthetic polynucleotide encoding artificial human antibody VL chain
  source 1..662: mol_type = other DNA
gggacatcgtgatgacccagtctccagactccctggctgtgtctctgggcgagagggccaccatcaactgcaagtccagccagagtgttttatacagctccgacaataagaactacttagcttggtaccagcagaaaccaggacagcctcctaagctgctcatttactgggcatctacccgggaatccggggtccctgaccgattcagtggcagcgggtctgggacagatttcactctcaccatcagcagcctggaggctgaagatgtggcagtttattactgtcagcagtattatgatactccctacacttttggccaggggaccaagctggagatcaaacgaactgtggctgcaccatctgtcttcatcttcccgccatctgatgagcagttgaaatctggaactgcctctgttgtgtgcctgctgaataacttctatcccagagaggccaaagtacagtggaaggtggataacgccctccaatcgggtaactcccaggagagtgtcacagagcaggacagcaaggacagcacctacagcctcagcagcaccctgacgctgagcaaagcagactacgagaaacacaaagtctacgcctgcgaagtcacccatcagggcctgagctcgcccgtcacaaagagcttcaacaggggagagtgt

SEQ ID NO: 2611 - DNA, 648 bp, synthetic construct
  misc_feature 1..648: note = Synthetic polynucleotide encoding artificial human antibody VL chain
  source 1..648: mol_type = other DNA
gcctctgccctgactcagcctgcctccgtgtctgggtctcctggacagtcgatcaccatctcctgcactggaaccagcagtgacgttggtggttataactatgtctcctggtaccaacagcacccaggcaaagcccccaaactcatgatttatgaggtcagtaatcggccctcaggggtttctaatcgcttctctggctccaagtctggcaacacggcctccctgaccatctctgggctccaggctgaggacgaggctgattattactgcagctcatatacaagcagcagcactctggtgttcggcggagggaccaagctgaccgtcctaggtcagcccaaggctgccccctcggtcactctgttcccaccctcctctgaggagcttcaagccaacaaggccacactggtgtgtctcataagtgacttctacccgggagccgtgacagtggcctggaaggcagatagcagccccgtcaaggcgggagtggagaccaccacaccctccaaacaaagcaacaacaagtacgcggccagcagctacctgagcctgacgcctgagcagtggaagtcccacaaaagctacagctgccaggtcacgcatgaagggagcaccgtggagaagacagtggcccctacagaatgttca

SEQ ID NO: 2612 - DNA, 641 bp, synthetic construct
  misc_feature 1..641: note = Synthetic polynucleotide encoding artificial human antibody VL chain
  source 1..641: mol_type = other DNA
gtgacatccagatgacccagtctccatcctccctgtctgcatctgtaggagacagagtcaccatcacttgccaggcgagtcaggacattagcaactatttaaattggtatcagcagaaaccagggaaagcccctaagctcctgatctacgatgcatccaatttggaaacaggggtcccatcaaggttcagtggaagtggatctgggacagattttactttcaccatcagcagcctgcagcctgaagatattgcaacatattactgtcaacagtatgataatctctggacgttcggccaagggaccaaggtggaaatcaaacgaactgtggctgcaccatctgtcttcatcttcccgccatctgatgagcagttgaaatctggaactgcctctgttgtgtgcctgctgaataacttctatcccagagaggccaaagtacagtggaaggtggataacgccctccaatcgggtaactcccaggagagtgtcacagagcaggacagcaaggacagcacctacagcctcagcagcaccctgacgctgagcaaagcagactacgagaaacacaaagtctacgcctgcgaagtcacccatcagggcctgagctcgcccgtcacaaagagcttcaacaggggagagtgt

SEQ ID NO: 2613 - DNA, 645 bp, synthetic construct
  misc_feature 1..645: note = Synthetic polynucleotide encoding artificial human antibody VL chain
  source 1..645: mol_type = other DNA
ccctatgtgctgactcagccaccctcggtgtcagtggccccaggacagacggccaggattacctgtgggggaaacaacattggaagtaaaagtgtgcactggtaccagcagaagccaggccaggcccctgtgttggtcgtctatgatgatagtgaccggccctcagggatccctgagcgattctctggctccaactctgggaacacggccaccctgaccatcagcagggtcgaagccggggatgaggccgactattactgtcaggtgtgggatagtagtagtgatcatctttatgtcttcggaactgggaccaaggtcaccgtcctaggtcagcccaaggccaaccccactgtcactctgttcccgccctcctctgaggagctccaagccaacaaggccacactagtgtgtctgatcagtgacttctacccgggagctgtgacagtggcctggaaggcagatggcagccccgtcaaggcgggagtggagaccaccaaaccctccaaacagagcaacaacaagtacgcggccagcagctacctgagcctgacgcccgagcagtggaagtcccacagaagctacagctgccaggtcacgcatgaagggagcaccgtggagaagacagtggcccctacagaatgttca

SEQ ID NO: 2614 - DNA, 645 bp, synthetic construct
  misc_feature 1..645: note = Synthetic polynucleotide encoding artificial human antibody VL chain
  source 1..645: mol_type = other DNA
gaaattgtcttggcgcagtctccaggcaccctatatttgtctccgggggaaagagccacgctctcctgcagggccagtcagagtgtaagaggcaattatttggcctggtaccagcagaggcctggccaggctccccggctcctcatctatggggcctccagcagggccactggcatcccagacaggttcggcggcagtgggtctgggacagacttcactctcaccatcaccagactgctgcctgaagattttgcagtgtactactgtcaccagtatggtagctcaccaaggacgttcggccaagggaccaaggtggaaatcaaacgaactgtggctgcaccatctgtcttcatcttcccgccatctgatgagcagttgaaatctggaactgcctctgttgtgtgcctgctgaataacttctatcccagagaggccaaagtacagtggaaggtggataacgccctccaatcgggtaactcccaggagagtgtcacagagcaggacagcaaggacagcacctacagcctcagcagcaccctgacgctgagcaaagcagactacgagaaacacaaagtctacgcctgcgaagtcacccatcagggcctgagctcgcccgtcacaaagagcttcaacaggggagagtgt

SEQ ID NO: 2615 - DNA, 651 bp, synthetic construct
  misc_feature 1..651: note = Synthetic polynucleotide encoding artificial human antibody VL chain
  source 1..651: mol_type = other DNA
cagtctgtgttgacgcagccgccctcagtgtctgcggccacgggacagaaggtcaccatctcctgctctggaggcagctccaacattgggagtaattatgtatcctggtaccaacaactcccaggaacagcccccaaacttctcatctttgaaaataataagcgaccctcagggattcctgaccgattctctggctccaagtctggcacgtcagccaccctgggcatcaccggactccagactggggacgaggccgattattactgcggaacatgggacagcagcctgactggtggttttgtcttcgggactgggaccaaggtcaccgtcctaggtcagcccaaggccaaccccactgtcactctgttcccgccctcctctgaggagctccaagccaacaaggccacactagtgtgtctgatcagtgacttctacccgggagctgtgacagtggcctggaaggcagatggcagccccgtcaaggcgggagtggagaccaccaaaccctccaaacagagcaacaacaagtacgcggccagcagctacctgagcctgacgcccgagcagtggaagtcccacagaagctacagctgccaggtcacgcatgaagggagcaccgtggagaagacagtggcccctacagaatgttca

SEQ ID NO: 2616 - DNA, 642 bp, synthetic construct
  misc_feature 1..642: note = Synthetic polynucleotide encoding artificial human antibody VL chain
  source 1..642: mol_type = other DNA
tcctatgtcctgactcagcccccctcagtgtcagtggccccaggaaagacggccactatcgcctgtggggaaaacaacattggaagttacaatgtgaactggtaccaacagaggccaggccaggcccctgtattagtaatccattctgatagcgaccggccctcggggatctctgagcgattctctggctccaactctgggaacacggccaccctgaccatcagcagggtcgaagccggggatgaggccgactattactgtcaggtgtgggacacttctaatgatgtgggggtgttcggcggagggaccaagctgaccgtcctaggtcagcccaaggctgccccctcggtcactctgttcccgccctcctctgaggagcttcaagccaacaaggccacactggtgtgtctcataagtgacttctacccgggagccgtgacagtggcctggaaggcagatagcagccccgtcaaggcgggagtggagaccaccacaccctccaaacaaagcaacaacaagtacgcggccagcagctacctgagcctgacgcctgagcagtggaagtcccacagaagctacagctgccaggtcacgcatgaagggagcaccgtggagaagacagtggcccctacagaatgttca

SEQ ID NO: 2617 - DNA, 647 bp, synthetic construct
  misc_feature 1..647: note = Synthetic polynucleotide encoding artificial human antibody VL chain
  source 1..647: mol_type = other DNA
gagaaattgtgttgacgcagtctccaggcaccctgtctttgtctccagggggaagagccaccctctcctgcagggccagtcagagggttagcagcaactacttagcctggtaccaacagaaacctggccaggctcccaggctcctcatctatggtccatccagcagggccactggcgtcccagacaggttcagtagcagtgggtctgggacagacttcactctcagcatcagcagactggagcctgaagattttgcagtgtatttctgtcagcagtatggtagctcacctccgactttcggcggagggaccaaggtggagatcaaacgaactgtggctgcaccatctgtcttcatcttcccgccatctgatgagcagttgaaatctggaactgcctctgttgtgtgcctgctgaataacttctatcccagagaggccaaagtacagtggaaggtggataacgccctccaatcgggtaactcccaggagagtgtcacagagcaggacagcaaggacagcacctacagcctcagcagcaccctgacgctgagcaaagcagactacgagaaacacaaagtctacgcctgcgaagtcacccatcagggcctgagctcgcccgtcacaaagagcttcaacaggggagagtgt

SEQ ID NO: 2618 - DNA, 648 bp, synthetic construct
  misc_feature 1..648: note = Synthetic polynucleotide encoding artificial human antibody VL chain
  source 1..648: mol_type = other DNA
gcctctgccctgactcagcctgcctccgtgtctgggtctcctggacagtcgatcaccatctcctgcactggaaccagcagtgatgttgggagttataaccttgtctcctggtaccaacaacacccaggcaaagcccccgaactcatgatttatgagggcagtaagcggccctcaggggtttctaatcgcttctctggctccaagtctggcaacacggcctccctgacaatctctggactccaggctgaggacgaggctgattattactgctgctcatatgcaggtagtagcaattgggtgttcggcggagggaccaagctgaccgtcctaggtcagcccaaggctgccccctcggtcactctgttcccgccctcctctgaggagcttcaagccaacaaggccacactggtgtgtctcataagtgacttctacccgggagccgtgacagtggcctggaaggcagatagcagccccgtcaaggcgggagtggagaccaccacaccctccaaacaaagcaacaacaagtacgcggccagcagctacctgagcctgacgcctgagcagtggaagtcccacaaaagctacagctgccaggtcacgcatgaagggagcaccgtggagaagacagtggcccctacagaatgttca

SEQ ID NO: 2619 - DNA, 654 bp, synthetic construct
  misc_feature 1..654: note = Synthetic polynucleotide encoding artificial human antibody VL chain
  source 1..654: mol_type = other DNA
gatgttgtaatgactcagtctccactctacctgcccgtcacccttggacagccggcctccatctcctgcagggctagtcaaagcctcgtatacagtgatggaaacacctacttgaattgggttcatcagaggccaggccaatctccaaggcgcctaatttacatggtttctcagcggggctctggggtcccagacagattcagcggcagcgggtcagacactgatttcacactgaaaatcagcagggtggaggctgaggatgttggggtttattactgcatgcaaggtacacactggtccgcttttggccaggggaccaagctggagatcaaacgaactgtggctgcaccatctgtcttcatcttcccgccatctgatgagcagttgaaatctggaactgcctctgttgtgtgcctgctgaataacttctatcccagagaggccaaagtacagtggaaggtggataacgccctccaatcgggtaactcccaggagagtgtcacagagcaggacagcaaggacagcacctacagcctcagcagcaccctgacgctgagcaaagcagactacgagaaacacaaagtctacgcctgcgaagtcacccatcagggcctgagctcgcccgtcacaaagagcttcaacaggggagagtgt

SEQ ID NO: 2620 - DNA, 648 bp, synthetic construct
  misc_feature 1..648: note = Synthetic polynucleotide encoding artificial human antibody VL chain
  source 1..648: mol_type = other DNA
ccctctgtgctgactcagccaccctcagcgtctgggacccccgggcagagggtcaccatctcttgttctggaagcagctccaacatcggaagtaattatgtatactggtaccagcagctcccaggaacggcccccaaactcctcatctataggaataatcagcggccctcaggggtccctgaccgattctctggctccaagtctggcacctcagcctccctggccatcagtgggctccggtccgaggatgaggctgattattactgtgcagcatgggatgacagcctgagtggtcaggtgttcggcggagggaccaagctgaccgtcctaggtcagcccaaggctgccccctcggtcactctgttcccgccctcctctgaggagcttcaagccaacaaggccacactggtgtgtctcataagtgacttctacccgggagccgtgacagtggcctggaaggcagatagcagccccgtcaaggcgggagtggagaccaccacaccctccaaacaaagcaacaacaagtacgcggccagcagctacctgagcctgacgcctgagcagtggaagtcccacaaaagctacagctgccaggtcacgcatgaagggagcaccgtggagaagacagtggcccctacagaatgttca

SEQ ID NO: 2621 - DNA, 642 bp, synthetic construct
  misc_feature 1..642: note = Synthetic polynucleotide encoding artificial human antibody VL chain
  source 1..642: mol_type = other DNA
gtttcttctgagctgactcaggaccctgctgtgtctgtggccttgggacagacagtcaggatcacatgccaaggagacagcctcagaagctattatgcaagctggtaccagcagaggccaggacaggcccctgtacttgtcatctatggtaaaaacaaccggccctcagggatcccagaccgattctctggctccagctcaggaaacacagcttccttgaccatcactggggctcaggcggaagatgaggctgactattactgtaactcccgggacagcagtggtaaccatgtcttcggaactgggaccaaggtcaccgtcctaggtcagcccaaggccaaccccactgtcactctgttcccgccctcctctgaggagctccaagccaacaaggccacactagtgtgtctgatcagtgacttctacccgggagctgtgacagtggcctggaaggcagatggcagccccgtcaaggcgggagtggagaccaccaaaccctccaaacagagcaacaacaagtacgcggccagcagctacctgagcctgacgcccgagcagtggaagtcccacagaagctacagctgccaggtcacgcatgaagggagcaccgtggagaagacagtggcccctacagaatgttca

SEQ ID NO: 2622 - DNA, 641 bp, synthetic construct
  misc_feature 1..641: note = Synthetic polynucleotide encoding artificial human antibody VL chain
  source 1..641: mol_type = other DNA
gtgacatccagatgacccagtctccatcctccctgtctgcatctgtaggagacagagtcaccatcacttgccgggcaagtcagagcattagcagctatttaaattggtatcagcagaaaccagggaaagcccctaagctcctgatctatgctgcatccagtttgcaaagtggggtcccatcaaggttcagtggcagtggatctgggacagatttcactctcaccatcagcagtctgcaacctgaagattttgcaacttactactgtcaacagagttacagtactcccaccttcggccaagggacacgactggagatcaaacgaactgtggctgcaccatctgtcttcatcttcccgccatctgatgagcagttgaaatctggaactgcctctgttgtgtgcctgctgaataacttctatcccagagaggccaaagtacagtggaaggtggataacgccctccaatcgggtaactcccaggagagtgtcacagagcaggacagcaaggacagcacctacagcctcagcagcaccctgacgctgagcaaagcagactacgagaaacacaaagtctacgcctgcgaagtcacccatcagggcctgagctcgcccgtcacaaagagcttcaacaggggagagtgt

SEQ ID NO: 2623 - DNA, 641 bp, synthetic construct
  misc_feature 1..641: note = Synthetic polynucleotide encoding artificial human antibody VL chain
  source 1..641: mol_type = other DNA
cctatgtgctgactcagccaccctcggtgtccgtggccccaggacagacggccaggattacctgtgggggaaacaacattggatatagaaatgtgtactggtaccaccaaaagccaggccaggcccctgtgctggtcgtctatgatgatagcgaccggccctcagggatccctgagcgattctctggctccaactctgggaacacggccaccctgaccatcagcagggtcgaagccggggatgaggccgactatttttgtcaggtgtgggaaagtggtggtgatcatccggtgttcggcggagggaccaagttgaccgtcctaggtcagcccaaggctgccccctcggtcactctgttcccgccctcctctgaggagcttcaagccaacaaggccacactggtgtgtctcataagtgacttctacccgggagccgtgacagtggcctggaaggcagatagcagccccgtcaaggcgggagtggagaccaccacaccctccaaacaaagcaacaacaagtacgcggccagcagctatctgagcctgacgcctgagcagtggaagtcccacagaagctacagctgccaggtcacgcatgaagggagcaccgtggagaagacagtggcccctacagaatgttca

SEQ ID NO: 2624 - DNA, 644 bp, synthetic construct
  misc_feature 1..644: note = Synthetic polynucleotide encoding artificial human antibody VL chain
  source 1..644: mol_type = other DNA
gtgacatccagatgacccagtctccatcctccctgtctgcatctgtaggagacagagtcaccatcacttgccgggcaagtcagggcattagaaatgatttaggctggtttcagcagaaaccagggaaagcccctaagcgcctcatctatgctgcatccaatttgccaagtggggtctcatcaaggttcagcggcagtggatctgggacagaattcactctcacaatcagcagcctgcagcctgaagattttgcaacgtattactgtctacagcataataattacccgttgacgttcggccaagggaccaaggtggaattcaaacgaactgtggctgcaccatctgtcttcatcttcccgccatctgatgagcagttgaaatctggaactgcctctgttgtgtgcctgctgaataacttctatcccagagaggccaaagtacagtggaaggtggataacgccctccaatcgggtaactcccaggagagtgtcacagagcaggacagcaaggacagcacctacagcctcagcagcaccctgacgctgagcaaagcagactacgagaaacacaaagtctacgcctgcgaagtcacccatcagggcctgagctcgcccgtcacaaagagcttcaacaggggagagtgt

SEQ ID NO: 2625 - DNA, 644 bp, synthetic construct
  misc_feature 1..644: note = Synthetic polynucleotide encoding artificial human antibody VL chain
  source 1..644: mol_type = other DNA
gtgacatccagatgacccagtctccttccaccctgtctgcatctgtaggagacagagtcaccatcacttgccgggccagtcagagtattagtagctggttggcctggtatcagcagaaaccagggaaagcccctaagctcctgatctatgatgcctccagtttggaaagtggggtcccatcaaggttcagcggcagtggatctgggacagaattcactctcaccatcagcagcctgcagcctgatgattttgcaactttttactgccaacagtataatagttatccgtacacttttggccaggggaccaagctggagatcaaacgaactgtggctgcaccatctgtcttcatcttcccgccatctgatgagcagttgaaatctggaactgcctctgttgtgtgcctgctgaataacttctatcccagagaggccaaagtacagtggaaggtggataacgccctccaatcgggtaactcccaggagagtgtcacagagcaggacagcaaggacagcacctacagcctcagcagcaccctgacgctgagcaaagcagactacgagaaacacaaagtctacgcctgcgaagtcacccatcagggcctgagctcgcccgtcacaaagagcttcaacaggggagagtgt

SEQ ID NO: 2626 - DNA, 659 bp, synthetic construct
  misc_feature 1..659: note = Synthetic polynucleotide encoding artificial human antibody VL chain
  source 1..659: mol_type = other DNA
gggatattgtgatgactcagtctccactctccctgcccgtcacccctggagagccggcctccatctcctgcaggtccagtcagagcctccttcatagtaatggattcaactatttggattggtacctgcagaagccagggcagtctccacagctcctgatttatttgggttctaatcgggcctccggggtccctgacaggttcagtggcagtggatcaggcacagattttacactgaagatcagcagagtggaggctgaggatgttggggtttattactgcatgcaagctctacagatcccccggacgttcggccaagggaccaaggtggaaatcaaacgaactgtggctgcaccatctgtcttcatcttcccgccatctgatgagcagttgaaatctggaactgcctctgttgtgtgcctgctgaataacttctatcccagagaggccaaagtacagtggaaggtggataacgccctccaatcgggtaactcccaggagagtgtcacagagcaggacagcaaggacagcacctacagcctcagcagcaccctgacgctgagcaaagcagactacgagaaacacaaagtctacgcctgcgaagtcacccatcagggcctgagctcgcccgtcacaaagagcttcaacaggggagagtgt

SEQ ID NO: 2627 - DNA, 636 bp, synthetic construct
  misc_feature 1..636: note = Synthetic polynucleotide encoding artificial human antibody VL chain
  source 1..636: mol_type = other DNA
ccctatgagctgactcagccaccctcagtgtccgtgtccccaggacagacagccagcatcacctgctctggagataaattgggggataaatatgcttgctggtatcagcagaagccaggccagtcccctgtgctggtcatctatcaagatagcaagcggccctcagggatccctgagcgattctctggctccaactctgggaacacagccactctgaccatcagcgggacccaggctatggatgaggctgactattactgtcaggcgtgggacagcaacgtccatgtcttcggaactgggaccaaggtcaccgtcctaggtcagcccaaggccaaccccactgtcactctgttcccgccctcctctgaggagctccaagccaacaaggccacactagtgtgtctgatcagtgacttctacccgggagctgtgacagtggcctggaaggcagatggcagccccgtcaaggcgggagtggagaccaccaaaccctccaaacagagcaacaacaagtacgcggccagcagctacctgagcctgacgcccgagcagtggaagtcccacagaagctacagctgccaggtcacgcatgaagggagcaccgtggagaagacagtggcccctacagaatgttca

SEQ ID NO: 2628 - DNA, 642 bp, synthetic construct
  misc_feature 1..642: note = Synthetic polynucleotide encoding artificial human antibody VL chain
  source 1..642: mol_type = other DNA
tcctatgagctgacacagccaccctcggtgtcagtgtccccaggacaaacggccaggatcacctgctctggagatgcattgccaaaaaaatatgctttttggtaccagcagaagtcaggccaggcccctgtgttggtcatctatgaggacagcaaacgaccctccgggatccctgagagattctctggctccagctcagggacaatggccaccttgactatcagtggggcccaggtggaggatgaatctgactactactgttactcaacagacagcagtggtaatgtctgggtgttcggcggagggaccaagctgaccgtcctaggtcagcccaaggctgccccctcggtcactctgttcccgccctcctctgaggagcttcaagccaacaaggccacactggtgtgtctcataagtgacttctacccgggagccgtgacagtggcctggaaggcagatagcagccccgtcaaggcgggagtggagaccaccacaccctccaaacaaagcaacaacaagtacgcggccagcagctacctgagcctgacgcctgagcagtggaagtcccacagaagctacagctgccaggtcacgcatgaagggagcaccgtggagaagacagtggcccctacagaatgttca

SEQ ID NO: 2629 - DNA, 645 bp, synthetic construct
  misc_feature 1..645: note = Synthetic polynucleotide encoding artificial human antibody VL chain
  source 1..645: mol_type = other DNA
gtttcttctgagctgactcaggaccctgctgtgtctgtggccttgggacagacagtcaggatcacatgccaaggagacagcctcagaagctattatgcaagctggtaccagcagaagccaggacaggcccctgtacttgtcatctatggtaaaaacaaccggccctcagggatcccagaccgattctctggctccagctcaggaaacacagcttccttgaccatcactggggctcaggcggaagatgaggctgactattactgtaactcccgggacagcagtggtaacctttatgtcttcggaactgggaccaaggtcaccgtcctaggtcagcccaaggccaaccccactgtcactctgttcccgccctcctctgaggagctccaagccaacaaggccacactagtgtgtctgatcagtgacttctacccgggagctgtgacagtggcctggaaggcagatggcagccccgtcaaggcgggagtggagaccaccaaaccctccaaacagagcaacaacaagtacgcggccagcagctacctgagcctgacgcccgagcagtggaagtcccacagaagctacagctgccaggtcacgcatgaagggagcaccgtggagaagacagtggcccctacagaatgttca

SEQ ID NO: 2630 - DNA, 662 bp, synthetic construct
  misc_feature 1..662: note = Synthetic polynucleotide encoding artificial human antibody VL chain
  source 1..662: mol_type = other DNA
gggacatcgcgatgacccagtctccagactccctggctgtgtctctgggcgagagggccaccatcaactgcaagtccagccagagtgttttatacagctccagcagtaagaactacttagcttggtaccagcagaaaccaggacagcctcctaagctgctcatttactgggcatctacccgggaatccggggtccctgaccgattcagtggcagcgggtctgggacagatttcactctcaccatcagcagcctgcaggctgaagatgtggcagtttattactgtcagcaatattatagtagtcctctcactttcggcggagggaccaaggtggagatcaaacgaactgtggctgcaccatctgtcttcatcttcccgccatctgatgagcagttgaaatctggaactgcctctgttgtgtgcctgctgaataacttctatcccagagaggccaaagtacagtggaaggtggataacgccctccaatcgggtaactcccaggagagtgtcacagagcaggacagcaaggacagcacctacagcctcagcagcaccctgacgctgagcaaagcagactacgagaaacacaaagtctacgcctgcgaagtcacccatcagggcctgagctcgcccgtcacaaagagcttcaacaggggagagtgt

SEQ ID NO: 2631 - DNA, 660 bp, synthetic construct
  misc_feature 1..660: note = Synthetic polynucleotide encoding artificial human antibody VL chain
  source 1..660: mol_type = other DNA
gatattgtgatgactcagtctccactctccctgcccgtcacccctggagagccggcctccatctcctgcaggtctagtcagagcctcctgcatagcaatggatacaactatttggattggtacctgcagaagccagggcagtctccacagctcctgatctatttgggttctaatcgggcctccggggtccctgacaggttcagtggcagtgggtcaggcacagattttacactgaaaatcagcagagtggaggctgacgatgttggggtttattactgcatgcaagctctacaaactcccccgtacacttttggccaggggaccaagctggagatcaaacgaactgtggctgcaccatctgtcttcatcttcccgccatctgatgagcagttgaaatctggaactgcctctgttgtgtgcctgctgaataacttctatcccagagaggccaaagtacagtggaaggtggataacgccctccaatcgggtaactcccaggagagtgtcacagagcaggacagcaaggacagcacctacagcctcagcagcaccctgacgctgagcaaagcagactacgagaaacacaaagtctacgcctgcgaagtcacccatcagggcctgagctcgcccgtcacaaagagcttcaacaggggagagtgt

SEQ ID NO: 2632 - DNA, 648 bp, synthetic construct
  misc_feature 1..648: note = Synthetic polynucleotide encoding artificial human antibody VL chain
  source 1..648: mol_type = other DNA
gcctctgccctgactcagcctgcctccgtgtctgggtctcctggacagtcgatcaccatctcctgcactggaaccagcagtgacgttggtggttataactatgtctcctggtaccaacagcacccaggcaaagccccccaactcatgatttttgacgtcagtaatcggccctcaggggtttctaatcgcttctctggctccaagtctggcgacacggcctccctgaccatctctgggctccaggctgaggacgaggctgattattactgcagctcatatacaagcagcagcacttgggtgttcggcggagggaccaagctgaccgtcctcggtcagcccaaggctgccccctcggtcactctgttcccaccctcctctgaggagcttcaagccaacaaggccacactggtgtgtctcataagtgacttctacccgggagccgtgacagtggcctggaaggcagatagcagccccgtcaaggcgggagtggagaccaccacaccctccaaacaaagcaacaacaagtacgcggccagcagctacctgagcctgacgcctgagcagtggaagtcccacaaaagctacagctgccaggtcacgcatgaagggagcaccgtggagaagacagtggcccctacagaatgttca

SEQ ID NO: 2633 - DNA, 662 bp, synthetic construct
  misc_feature 1..662: note = Synthetic polynucleotide encoding artificial human antibody VL chain
  source 1..662: mol_type = other DNA
gggacatcgtgatgacccagtctccagactccctggctgtgtctctgggcgagagggccaccatcaactgcaagtccagccagagtgttttatacagctccaacaataagaactacttaggttggtaccagcagaaaccaggagagcctcctaagctggtcattcactgggcatctacccgggaatccggggtccctgaccgattcagtggcagcgggtctgggacagatttcactctgaccatcagcagcctgcaggctgaagatgtggcagtttattactgtcagcaaagttacagtactccgtacacctttggccaggggaccaagctggagatcaaacgaactgtggctgcaccatctgtcttcatcttcccgccatctgatgagcagttgaaatctggaactgcctctgttgtgtgcctgctgaataacttctatcccagagaggccaaagtacagtggaaggtggataacgccctccaatcgggtaactcccaggagagtgtcacagagcaggacagcaaggacagcacctacagcctcagcagcaccctgacgctgagcaaagcagactacgagaaacacaaagtctacgcctgcgaagtcacccatcagggcctgagctcgcccgtcacaaagagcttcaacaggggagagtgt

SEQ ID NO: 2634 - DNA, 334 bp, synthetic construct
  misc_feature 1..334: note = Synthetic polynucleotide encoding artificial human antibody VL chain
  source 1..334: mol_type = other DNA
cagtctgccctgactcagcctgcctccgtgtctgggtctcctggacagtcgatcaccatctcctgcactggaaccagcagtgatgttgggagttataaccttgtctcctggtaccaacagcacccaggcaaagcccccaaactcatgatttatgagggcagtaagcggccctcaggggtttctaatcgcttctctggctccaagtctggcaacacggcctccctgacaatctctgggctccaggctgaggacgaggctgattattactgctgctcatatgcaggtagtagcactccttgggtgttcggcggagggaccaagctgaccgtcctag

SEQ ID NO: 2635 - DNA, 642 bp, synthetic construct
  misc_feature 1..642: note = Synthetic polynucleotide encoding artificial human antibody VL chain
  source 1..642: mol_type = other DNA
ccctatgagctgacacagccaccctcggtgtcactgtccccaggacaaacggccaggatcacctgctctggagatgctttgccaaaaaaatatgcttactggtaccagcagaagtcaggccaggcccctgtactggtcatctatgaggacagcaaacgaccctccgggatccctgagagattctctggctccagctcagggacaacggccaccttgactatcagtggggcccaggtggacgatgaaggtgactactactgttactcaccagacagcagtggtaatgtttgggtgttcggcggagggaccaagctgaccgtcctaggtcagcccaaggctgccccctcggtcactctgttcccaccctcctctgaggagcttcaagccaacaaggccacactggtgtgtctcataagtgacttctacccgggagccgtgacagtggcctggaaggcagatagcagccccgtcaaggcgggagtggagaccaccacaccctccaaacaaagcaacaacaagtacgcggccagcagctacctgagcctgacgcctgagcagtggaagtcccacaaaagctacagctgccaggtcacgcatgaagggagcaccgtggagaagacagtggcccctacagaatgttca

SEQ ID NO: 2636 - DNA, 310 bp, synthetic construct
  misc_feature 1..310: note = Synthetic polynucleotide encoding artificial human antibody VL chain
  source 1..310: mol_type = other DNA
gaaatagtgatgacgcagtctccagccaccctgtctgtgtctccaggggaaagagccaccctctcctgcagggccagtcagagtgttagcagcaacttagcctggtaccagcagaaacctggccaggctcccaggctcctcatctatggtgcatccaccagggccactggtctcccagccaggttcagtggcagtgggtctgggacagagttcactctcaccatcagcagcctgcagtctgaagattttgcagtttattactgtcagtcccggggcactttcggcggagggaccaaggtggagatcaaac

SEQ ID NO: 2637 - DNA, 329 bp, synthetic construct
  misc_feature 1..329: note = Synthetic polynucleotide encoding artificial human antibody VL chain
  source 1..329: mol_type = other DNA
gaaattgtgttgacgcagtctccagtcaccctgtctttgtctccaggggaaagagccaccctctcctgcagggccagtcagagtgttagcagcagctacatagcctggtaccagcagaaacctggccaggctcccaggctcctcatctatggtgcatccaccagggccactggcatcccagacaggttcagtggcagtgggtctgggacagacttcactctcaccatcagcagactggagcctgaagattgtgcagtgttttactgtcagcagtatggtagctcacattacacttttggccaggggaccaagctggagatcaaacgaac

SEQ ID NO: 2638 - DNA, 645 bp, synthetic construct
  misc_feature 1..645: note = Synthetic polynucleotide encoding artificial human antibody VL chain
  source 1..645: mol_type = other DNA
tcctatgtgctgactcagccaccctcagtgtcagtggccccaggaaagacggccaggattacctgtgggggagacaacattggaagtagaagtgtccactggtaccagcagaagccaggccaggcccctgtgctggtcatctattatgatagcgaccggccctcagggatccctgagcgattctctggctccaactctggcaacacggccaccctgaccatcagcagggtcgaagccggggatgaggccgactattactgtcaggtgtgggatagtagtagtgatcatccttgggtgttcggcggagggaccaagctgaccgtcctacgtcagcccaaggctgccccctcggtcactctgttcccgccctcctctgaggagcttcaagccaacaaggccacactggtgtgtctcataagtgacttctacccgggagccgtgacagtggcctggaaggcagatagcagccccgtcaaggcgggagtggagaccaccacaccctccaaacaaagcaacaacaagtacgcggccagcagctacctgagcctgacgcctgagcagtggaagtcccacaaaagctacagctgccaggtcacgcatgaagggagcaccgtggagaagacagtggcccctacagaatgttca

SEQ ID NO: 2639 - DNA, 334 bp, synthetic construct
  misc_feature 1..334: note = Synthetic polynucleotide encoding artificial human antibody VL chain
  source 1..334: mol_type = other DNA
cagtctgccctgactcagcctgcctccgtgtctgggtctcctggacagtcgatcaccatctcctgcactggcaccagcagtgatattgggacttataaccttgtctcctggtaccaacaacgcccaggcaaagcccccaaactcatcatttatgacgtcattaagcggccctcagggatttctgatcgcttctctggctccaagtctgacaacatggcctccctgacaatctctggcctccaggctgaggacgaggctcactattactgctgctcgtatagaagtagtacggctcccgtggtcttcggcggggggaccaaggtgaccgtcctag

SEQ ID NO: 2640 - DNA, 340 bp, synthetic construct
  misc_feature 1..340: note = Synthetic polynucleotide encoding artificial human antibody VL chain
  source 1..340: mol_type = other DNA
ggcatcgtgatgacccagtctccagactccctggctgtgtctctgggcgagagggccaccatcaactgcaagtccagccagagtgttttatccacctccaacaataagaactacttagcttggtaccagcagaaaccaggacagcctcctaagctgctcatttactgggcatctacccgggaatccggggtccctgaccgattcagtggcagcgggtctgggacagatttcactctcaccatcagcagcctgcaggctgaagatgtggcagtttattactgtcagcaatattttagtactccgtggacgttcggccaagggaccaaggtggaaatcaaac

SEQ ID NO: 2641 - DNA, 642 bp, synthetic construct
  misc_feature 1..642: note = Synthetic polynucleotide encoding artificial human antibody VL chain
  source 1..642: mol_type = other DNA
tcctatgtgctgactcagccaccctcggtgtcagtggccccaggacagacggccaggattacctgtgggggaaacaacattggaagtaaaagtgtgcactggtaccaacagaagccaggccaggcccctgtgctggtcgtctatgatgatagcgaccggccctcagggatccctgagcgattctctggctccaactctggaaacacggccaccctgaccatcagcagggtcgaagccggggatgaggccgactattactgtcaggtgtgggatggttatagtgatccattggtattcggcggagggaccaagctgaccgtcctaggtcagcccaaggctgccccctcggtcactctgttcccaccctcctctgaggagcttcaagccaacaaggccacactggtgtgtctcataagtgacttctacccgggagccgtgacagtggcctggaaggcagatagcagccccgtcaaggcgggagtggagaccaccacaccctccaaacaaagcaacaacaagtacgcggccagcagctacctgagcctgacgcctgagcagtggaagtcccacaaaagctacagctgccaggtcacgcatgaagggagcaccgtggagaagacagtggcccctacagaatgttca

SEQ ID NO: 2642 - DNA, 642 bp, synthetic construct
  misc_feature 1..642: note = Synthetic polynucleotide encoding artificial human antibody VL chain
  source 1..642: mol_type = other DNA
gaggtccagatgacccagtctccatcctccctgtctgcatctgttggcgacagagtcaccatcacttgccgggcaagtcagcacattgccgggcgtctaaattggtatcagcagaaaccagggaaagccccaaaactcctgatccatagtgcatccagtgtgcaaagagaggtcccatcaaggttcggtggcagtggatttgggacagatttcactctcaccatctacagtctgcaagctgaagattttgcaacttacttctgtcaacagagttactatacccctcccactttcgccggagggaccagggtggatttgaaacgaactgtggctgcaccatctgtcttcatcttcccgccatctgatgagcagttgaaatctggaactgcctctgttgtgtgcctgctgaataacttctatcccagagaggccaaagtacagtggaaggtggataacgccctccaatcgggtaactcccaggagagtgtcacagagcaggacagcaaggacagcacctacagcctcagcagcaccctgacgctgagcaaagcagactacgagaaacacaaagtctacgcctgcgaagtcacccatcagggcctgagctcgcccgtcacaaagagcttcaacaggggagagtgt

SEQ ID NO: 2643 - DNA, 651 bp, synthetic construct
  misc_feature 1..651: note = Synthetic polynucleotide encoding artificial human antibody VL chain
  source 1..651: mol_type = other DNA
cggtctgtgctgactcagccaccctcagcgtctgggacccccgggcagagggtcaccatctcttgttctggaagcagctccaacatcggaagtaatactgtaaactggtaccagcagctcccaggaacggcccccaaactcctcatctatagtaataatcagcggccctcaggggtccctgaccgattctctggctccaagtctggcacctcagcctccctggccatcagtgggctccagtctgaggatgaggctgattattactgtgcagcatgggatgacagcctgaatgggctttgggtgttcggcggagggaccaagctgaccgtcctaggtcagcccaaggctgccccctcggtcactctgttcccgccctcctctgaggagcttcaagccaacaaggccacactggtgtgtctcataagtgacttctacccgggagccgtgacagtggcctggaaggcagatagcagccccgtcaaggcgggagtggagaccaccacaccctccaaacaaagcaacaacaagtacgcggccagcagctacctgagcctgacgcctgagcagtggaagtcccacaaaagctacagctgccaggtcacgcatgaagggagcaccgtggagaagacagtggcccctacagaatgttca

SEQ ID NO: 2644 - DNA, 651 bp, synthetic construct
  misc_feature 1..651: note = Synthetic polynucleotide encoding artificial human antibody VL chain
  source 1..651: mol_type = other DNA
gattttctgctgactcagccccactctgtgtcggagtctccggggaagacggtaaccatctcctgcacccgcagcagtggcagcattgccagcaactatgtgcagtggtaccagcagcgcccgggcagttccccctccactgtgatctatgaagatcaccaaagaccctctggggtccctggtcggttctctggctccatcgacagctcctccaactctgcctccctcaccatctctggactgaagactgaggacgaggctgactacttctgtcagtcttctgacagcaacaatcatgtggtcttcggcggagggaccaagctgaccgtcctaggtcagcccaaggctgccccctcggtcactctgttcccgccctcctctgaggagcttcaagccaacaaggccacactggtgtgtctcataagtgacttctacccgggagccgtgacagtggcctggaaggcagatagcagccccgtcaaggcgggagtggagaccaccacaccctccaaacaaagcaacaacaagtacgcggccagcagctacctgagcctgacgcctgagcagtggaagtcccacagaagctacagctgccaggtcacgcatgaagggagcaccgtggagaagacagtggcccctacagaatgttca

SEQ ID NO: 2645 - DNA, 651 bp, synthetic construct
  misc_feature 1..651: note = Synthetic polynucleotide encoding artificial human antibody VL chain
  source 1..651: mol_type = other DNA
cggtctgtgctgacgcagccgccctcagtgtctggggccccagggcagagggtcaccatctcctgcactgggagcagctccaacatcggggcacattatgatgtacactggtaccagcagcttccaggaacagcccccaaactcctcatctatggtaacagcaatcggccctcaggggtccctgaccgattctctggctccaagtctggcacctcagcctccctggccatcactgggctccaggctgaggatgaggctgattattactgccagtcctatgacagcagcctgagtggtgtgctattcggcggagggaccaaactgaccgtcctaggtcagcccaaggctgccccctcggtcactctgttcccgccctcctctgaggagcttcaagccaacaaggccacactggtgtgtctcataagtgacttctacccgggagccgtgacagtggcctggaaggcagatagcagccccgtcaaggcgggagtggagaccaccacaccctccaaacaaagcaacaacaagtacgcggccagcagctatctgagcctgacgcctgagcagtggaagtcccacagaagctacagctgccaggtcacgcatgaagggagcaccgtggagaagacagtggcccctacagaatgttca

SEQ ID NO: 2646 - DNA, 642 bp, synthetic construct
  misc_feature 1..642: note = Synthetic polynucleotide encoding artificial human antibody VL chain
  source 1..642: mol_type = other DNA
gacatccagatgacccagtctccatcctccctgtctgcatctgtgggagacagagtcaccatcacttgccgggcaagtcagagcattagtagttatttaaattggtatcagcagaaaccagggaaagcccctaagttcctgatctatgctgcatccagtttgcaaagtggggtcccatcaaggttcagtggcagtggatctgggacagatttcactctcaccatcagcagtctgcaacctgaagattttgcaacttactactgtcaacagagttacagtacccccttcactttcggccctgggaccaaagtggatctcaaacgaactgtggctgcaccatctgtcttcatcttcccgccatctgatgagcagttgaaatctggaactgcctctgttgtgtgcctgctgaataacttctatcccagagaggccaaagtacagtggaaggtggataacgccctccaatcgggtaactcccaggagagtgtcacagagcaggacagcaaggacagcacctacagcctcagcagcaccctgacgctgagcaaagcagactacgagaaacacaaagtctacgcctgcgaagtcacccatcagggcctgagctcgcccgtcacaaagagcttcaacaggggagagtgt

SEQ ID NO: 2647 - DNA, 642 bp, synthetic construct
  misc_feature 1..642: note = Synthetic polynucleotide encoding artificial human antibody VL chain
  source 1..642: mol_type = other DNA
gacatccagatgacccagtctccaccctccctgtctgcatctgtgggagacagagtcaccatcacttgccaggcgagtcaggacattagcaactatttaaattggtatcagcagaaaccagggaaaacccctaagctcctgatctacgctgcatccactttggaaacaggggtcccatcaaggttcagtggaagtggatctgggacagattttactttcaccatcaacagcctgcagcctgaagatattgcaacatattactgtcaacagtatgatagtctccctctcactttcggcggagggaccaaggtggagatcaaacgaactgtggctgcaccatctgtcttcatcttcccgccatctgatgagcagttgaaatctggaactgcctctgttgtgtgcctgctgaataacttctatcccagagaggccaaagtacagtggaaggtggataacgccctccaatcgggtaactcccaggagagtgtcacagagcaggacagcaaggacagcacctacagcctcagcagcaccctgacgctgagcaaagcagactacgagaaacacaaagtctacgcctgcgaagtcacccatcagggcctgagctcgcccgtcacaaagagcttcaacaggggagagtgt

SEQ ID NO: 2648 - DNA, 650 bp, synthetic construct
  misc_feature 1..650: note = Synthetic polynucleotide encoding artificial human antibody VL chain
  source 1..650: mol_type = other DNA
gagaaattgtgttgacgcagtctccaggcaccctgtctttgtctccagggcatagagccaccctctcctgcagggccagtcaagatgttgccagcacctacttagcctggtaccagcagaaacctggccaggctcccaggctcctcatctatggtgcatccagcagggccactggcatcccagacaggttcagtggcagtgggtctgggacagacttcactctcaccatcagcagactggagcctgaagattttgcagtgttttattgtcagtactatggtggctcaccgggattcactttcggccctgggaccaaagtggatttcaaacgaactgtggctgcaccatctgtcttcatcttcccgccatctgatgagcagttgaaatctggaactgcctctgttgtgtgcctgctgaataacttctatcccagagaggccaaagtacagtggaaggtggataacgccctccaatcgggtaactcccaggagagtgtcacagagcaggacagcaaggacagcacctacagcctcagcagcaccctgacgctgagcaaagcagactacgagaaacacaaagtctacgcctgcgaagtcacccatcagggcctgagctcgcccgtcacaaagagcttcaacaggggagagtgt

SEQ ID NO: 2649 - DNA, 648 bp, synthetic construct
  misc_feature 1..648: note = Synthetic polynucleotide encoding artificial human antibody VL chain
  source 1..648: mol_type = other DNA
cagtctgccctgactcagcctgcctccgtgtctgggtctcctggacagtcgatcaccatctcctgcactggaaccaccagtgatgttgggacttataaccttgtctcctggtaccaacaactcccaggcaaagcccccaaactcattatttatgaggtcactaagcggccctcaggagtttctaatcgcttctctgcctccaagtctggcagcacggcctccctgacaatctctgggctccaggctgaggacgaggctgattattactgctgctcatatgcaggtagtagcacttatgtcttcggaagtggggccagggtcaccgtcctaggtcagcccaaggccaaccccactgtcactctgttcccgccctcctctgaggagctccaagccaacaaggccacactagtgtgtctgatcagtgacttctacccgggagctgtgacagtggcctggaaggcagatggcagccccgtcaaggcgggagtggagaccaccaaaccctccaaacagagcaacaacaagtacgcggccagcagctacctgagcctgacgcccgagcagtggaagtcccacagaagctacagctgccaggtcacgcatgaagggagcaccgtggagaagacagtggcccctacagaatgttca

SEQ ID NO: 2650 - DNA, 650 bp, synthetic construct
  misc_feature 1..650: note = Synthetic polynucleotide encoding artificial human antibody VL chain
  source 1..650: mol_type = other DNA
gagaaattgtgttgacgcagtctccaggcaccctgtctttgtctccaggggaaacagccaccctctcctgcagggccagtcagagtgttgccaacaactacttagcctggcatcagcagaagcctggccaggctcccagactcctcatctatggtgcatccaaaagggccgctggcatcccagaccggttcagtggcagtgggtctgggacagagttcactctcaccatcagcagactggagcctgaagattgtgcagtgtattactgtcaggagtatgttaaatcacctggattcgctttcggccctgggaccagagtggatatcaaacgaactgtggctgcaccatctgtcttcatcttcccgccatctgatgagcagttgaaatctggaactgcctctgttgtgtgcctgctgaataacttctatcccagagaggccaaagtacagtggaaggtggataacgccctccaatcgggtaactcccaggagagtgtcacagagcaggacagcaaggacagcacctacagcctcagcagcaccctgacgctgagcaaagcagactacgagaaacacaaagtctacgcctgcgaagtcacccatcagggcctgagctcgcccgtcacaaagagcttcaacaggggagagtgt

SEQ ID NO: 2651 - DNA, 645 bp, synthetic construct
  misc_feature 1..645: note = Synthetic polynucleotide encoding artificial human antibody VL chain
  source 1..645: mol_type = other DNA
gaaattgtgttgacgcagtctccagccaccctgtctttgtctccaggggaaagagccaccctctcctgcagggccagtcagagtgttagcagcaactacttagcctggtaccagcagaaacctggccaggctcccaggctcctcatccatggtgcatccagcagggccactggcttcccagacagattcagtggcagtgggtctgggacagacttcactctcaccatcaacagactggagcctgaagattttgcagtgtattattgtcagcagtatggtacttcacctcagacgttcggccaagggaccaaggtggaaatcaaacgaactgtggctgcaccatctgtcttcatcttcccgccatctgatgagcagttgaaatctggaactgcctctgttgtgtgcctgctgaataacttctatcccagagaggccaaagtacagtggaaggtggataacgccctccaatcgggtaactcccaggagagtgtcacagagcaggacagcaaggacagcacctacagcctcagcagcaccctgacgctgagcaaagcagactacgagaaacacaaagtctacgcctgcgaagtcacccatcagggcctgagctcgcccgtcacaaagagcttcaacaggggagagtgt

SEQ ID NO: 2652 - DNA, 650 bp, synthetic construct
  misc_feature 1..650: note = Synthetic polynucleotide encoding artificial human antibody VL chain
  source 1..650: mol_type = other DNA
ctcagactgtggtgacccaggagccatcgttctcagtgtcccctggagggacagtcacattcacttgtgcctggagttctggttcagtctccactagtttctacaccagctggtaccgccagaccccaggccaggctccacaaacgctcatctacaacacaaatcgtcgttcttctggggtccctgatcgcttctctggctccatccttgggaacaaagctgccctcaccatcacgggggcccaggcagatgatgactctgattattattgtatgttgtatatgggtagtggcatttcgctcttcggcggagggaccaagctgaccgtcctaggtcagcccaaggctgccccctcggtcactctgttcccgccctcctctgaggagcttcaagccaacaaggccacactggtgtgtctcataagtgacttctacccgggagccgtgacagtggcctggaaggcagatagcagccccgtcaaggcgggagtggagaccaccacaccctccaaacaaagcaacaacaagtacgcggccagcagctatctgagcctgacgcctgagcagtggaagtcccacagaagctacagctgccaggtcacgcatgaagggagcaccgtggagaagacagtggcccctacagaatgttca

SEQ ID NO: 2653 - DNA, 654 bp, synthetic construct
  misc_feature 1..654: note = Synthetic polynucleotide encoding artificial human antibody VL chain
  source 1..654: mol_type = other DNA
cagtctgtgctgacgcagccgccctcagtgtctggggccccagggcagagggtcaccatctcctgcactgggagcagctccaacatcggggcacaatatgatgtacactggtacaaggtaattccaggaacagcccccaaactcctcatctatggtaacgacaatcggccctcaggggtccctgaccgattctctggctccaagtctggcacctcagcctccctggccatcactgggctccaatctgaggatgaggctgattattactgccagtccaatgacatcagcctgagtggttctgtggtatttggcggagggactaagctgaccgtcctaggtcagcccaaggctgccccctcggtcactctgttcccgccctcctctgaggagcttcaagccaacaaggccacactggtgtgtctcataagtgacttctacccgggagccgtgacagtggcctggaaggcagatagcagccccgtcaaggcgggagtggagaccaccacaccctccaaacaaagcaacaacaagtacgcggccagcagctatctgagcctgacgcctgagcagtggaagtcccacagaagctacagctgccaggtcacgcatgaagggagcaccgtggagaagacagtggcccctacagaatgttca

SEQ ID NO: 2654 - DNA, 651 bp, synthetic construct
  misc_feature 1..651: note = Synthetic polynucleotide encoding artificial human antibody VL chain
  source 1..651: mol_type = other DNA
ccgtctgtactgacgcagccgccctcagtgtctggggccccagggcagagggtcaccatctcctgcactgggagcagctccaacatcggggcaggttacgatgtacactggtaccaacagcttccaggaacagcccccaaactcctcatctatgctaacaccaatcgaccctcaggggtccctgaccgattctctggctccaagtctggcacctcagcctccctggccatcactgggctccaggctgaagatgaggctgattattactgccaatcctatgacaatagcctgagtgggggggtgttcggcggagggaccaagctgaccgtcctaggtcagcccaaggctgccccctcggtcactctgttcccgccctcctctgaggagcttcaagccaacaaggccacactggtgtgtctcataagtgacttctacccgggagccgtgacagtggcctggaaggcagatagcagccccgtcaaggcgggagtggagaccaccacaccctccaaacaaagcaacaacaagtacgcggccagcagctatctgagcctgacgcctgagcagtggaagtcccacagaagctacagctgccaggtcacgcatgaagggagcaccgtggagaagacagtggcccctacagaatgttca

SEQ ID NO: 2655 - DNA, 647 bp, synthetic construct
  misc_feature 1..647: note = Synthetic polynucleotide encoding artificial human antibody VL chain
  source 1..647: mol_type = other DNA
gaaaaattgtgttgacgcagtctcccggcaccctgtctttgtctccaggggaaagggccaccctctcctgcagggccagtcagagtgttagcagcagttacttagcctggtaccagcagagacctggccagtctcccaggctcctcatctatgagacttccaccagggccactggcatcccagacaggttcagtggcagtgggtctgggacagacttcactctcaccatcagcggactggagcctgaagattttgcagtctattactgtcagcagtttgatatttcacccttcactttcggccctgggaccaaagtggatgtcaaacgaactgtggctgcaccatctgtcttcatcttcccgccatctgatgagcagttgaaatctggaactgcctctgttgtgtgcctgctgaataacttctatcccagagaggccaaagtacagtggaaggtggataacgccctccaatcgggtaactcccaggagagtgtcacagagcaggacagcaaggacagcacctacagcctcagcagcaccctgacgctgagcaaagcagactacgagaaacacaaagtctacgcctgcgaagtcacccatcagggcctgagctcgcccgtcacaaagagcttcaacaggggagagtgt

SEQ ID NO: 2656 - DNA, 648 bp, synthetic construct
  misc_feature 1..648: note = Synthetic polynucleotide encoding artificial human antibody VL chain
  source 1..648: mol_type = other DNA
cagtctgccctgactcagcctgcctccgtgtctgggtctcctggacagtcgatcaccatctcctgcactggaaccagcagtgacgttggtggttataactatgtctcctggtaccaacaacacccaggcaaagcccccaaactcatgatttatgatgtcagtaatcggccctcaggggtttctaatcgcttctctggctccaagtctggcaacacggcctccctgaccatctctgggctccaggctgaggacgaggctgattattactgcagctcatatacaagcagcagctccttggtgttcggcggagggaccaaggtgaccgtcctaggtcagcccaaggctgccccctcggtcactctgttcccgccctcctctgaggagcttcaagccaacaaggccacactggtgtgtctcataagtgacttctacccgggagccgtgacagtggcctggaaggcagatagcagccccgtcaaggcgggagtggagaccaccacaccctccaaacaaagcaacaacaagtacgcggccagcagctacctgagcctgacgcctgagcagtggaagtcccacaaaagctacagctgccaggtcacgcatgaagggagcaccgtggagaagacagtggcccctacagaatgttca

SEQ ID NO: 2657 - DNA, 331 bp, synthetic construct
  misc_feature 1..331: note = Synthetic polynucleotide encoding artificial human antibody VL chain
  source 1..331: mol_type = other DNA
cagtctgccctgactcagcctgcctccgtgtctggctctcctgggcagtcgatcaccatctcctgcactggaaccagcagtgatattgggggttatgaccttgtctcctggtaccaacaccacccaggcaaagcccccaaactcgtgatttctgagggcagtaagcggccctcaggggtttctaatcgcttctttggctccaagtctggcaacacggcctccctgacaatctctggcctccaggctgaggacgaggctgattattactgctgctcatttacaggtactagcacttttgtcttcggaactgggaccaaggtcaccgtcctag

SEQ ID NO: 2658 - DNA, 340 bp, synthetic construct
  misc_feature 1..340: note = Synthetic polynucleotide encoding artificial human antibody VL chain
  source 1..340: mol_type = other DNA
gacatcgtgatgacccagtctccagactccctggctgtgtctctgggcgagagggccaccatcaactgcaagtccagccagagtgttttatacagctccaacaataagaactacttagcttggtaccagcagaaaccaggacagcctcctaagctgctcatttactgggcatctacccgggaatccggggtccctgaccgattcagtggcagcgggtctgggacagacttcactctcaccatcagcagcctagagcctgaagattttgcagtttattactgtcagcaatattatagtactccgtacacttttggccaggggaccaagctggagatcaaac

SEQ ID NO: 2659 - DNA, 648 bp, synthetic construct
  misc_feature 1..648: note = Synthetic polynucleotide encoding artificial human antibody VL chain
  source 1..648: mol_type = other DNA
cagtctgtgctgactcagccaccctcagcgtctgggacccccgggcagagggtcaccatctcttgttctggaagcagctccaacatcggaagtaatactgttaactggtaccagcagttcccaggaacggcccccaaactcctcatctacagtaataatcaccggcccttaggggtccctgaccgattctctggctccaagtctggcacctcagcctccctggccatcagtgaggtccgctctgaggatgaggctgattattattgtgcaacatgggatgacagcctgaatggaggggtgttcggcgcagggaccaagctgaccgtcgtaggtcagcccaaggctgccccctcggtcactctgttcccgccctcctctgaggagcttcaagccaacaaggccacactggtgtgtctcataagtgacttctacccgggagccgtgacagtggcctggaaggcagatagcagccccgtcaaggcgggagtggagaccaccacaccctccaaacaaagcaacaacaagtacgcggccagcagctacctgagcctgacgcctgagcagtggaagtcccacagaagctacagctgccaggtcacgcatgaagggagcaccgtggagaagacagtggcccctacagaatgttca

SEQ ID NO: 2660 - DNA, 645 bp, synthetic construct
  misc_feature 1..645: note = Synthetic polynucleotide encoding artificial human antibody VL chain
  source 1..645: mol_type = other DNA
ccagctgtggtgactcaggagccctcactgactgtgtccccaggagggacagtcactctcacctgtggctccagcactggagtagtcaccactggtcattatccctactggttccagcagaagcctggccaagcccccacgacactgatttttgatacaagcaacaaacactcctggacccctgcccgcttctcaggctccctccttgggggcaaagctgccctgaccctttctgctgcgcagcctgaagatgaggctgactattactgctggctcatctctggtggtgcccctgtattcggcggagggaccaagctgaccgtcctaggtcagcccaaggctgccccctcggtcactctgttcccgccctcctctgaggagcttcaagccaacaaggccacactggtgtgtctcataagtgacttctacccgggagccgtgacagtggcctggaaggcagatagcagccccgtcaaggcgggagtggagaccaccacaccctccaaacaaagcaacaacaagtacgcggccagcagctatctgagcctgacgcctgagcagtggaagtcccacagaagctacagctgccaggtcacgcatgaagggagcaccgtggagaagacagtggcccctacagaatgttca

SEQ ID NO: 2661 - DNA, 334 bp, synthetic construct
  misc_feature 1..334: note = Synthetic polynucleotide encoding artificial human antibody VL chain
  source 1..334: mol_type = other DNA
cagtctgtgctgacgcagccgccctcagtgtctggggccccagggcagagagtcaccatctcctgcgctgggagctactccaacatcggggcaggttatgatgtacactggtaccgccaacttccaggaacagcccccacactcctcatctatagtaacaacaatcggccctcaggggtctctgaccgattctctggctccaaatctggcacctcagcctccctggccatcactgggctccaggctgaggatgaggctgattattactgccagtcctttgacagcagcctgagtcgttctgtcttcggaactgggaccaaggtcaccgtcctag

SEQ ID NO: 2662 - DNA, 324 bp, synthetic construct
  misc_feature 1..324: note = Synthetic polynucleotide encoding artificial human antibody VL chain
  source 1..324: mol_type = other DNA
gagaaattgtattgacacagtctccagccaccctgtctttctctccaggggacagagccaccctctcctgcagggccagtcagaatattaacaggttcttagcctggtatcaacagaaaccgggccagactcccaggctcctcatctatgatgcatccactcgggccactggcatccctgcccggttcagtggcagtgggtctgggacagacttcagtctcatcatcagcagcctagagcctgaagattttgcgatttattactgccagcagcgtaacaactggcctatcactttcggccctgggaccaaagtggatgtcaaac

SEQ ID NO: 2663 - DNA, 642 bp, synthetic construct
  misc_feature 1..642: note = Synthetic polynucleotide encoding artificial human antibody VL chain
  source 1..642: mol_type = other DNA
gccatccaaatgacccagtctccatcctccctgtctgcatctgtaggagacagagtcaccatcacttgccgggcaagtcagggcattagaaatgatttaggctggtatcagcagaaaccagggaaagcccctaagctcctgatctatgctgcatccagtttacaaagtggggtcccatcaaggttcagcggcagtggatctggcacagatttcactctcaccatcagcagcctgcagcctgaagattttgcaacttattactgtctacaagattacaattaccctccgacgttcggccaagggaccaaggtggaaatcaaacgaactgtggctgcaccatctgtcttcatcttcccgccatctgatgagcagttgaaatctggaactgcctctgttgtgtgcctgctgaataacttctatcccagagaggccaaagtacagtggaaggtggataacgccctccaatcgggtaactcccaggagagtgtcacagagcaggacagcaaggacagcacctacagcctcagcagcaccctgacgctgagcaaagcagactacgagaaacacaaactctacgcctgcgaagtcacccatcagggcctgagctcgcccgtcacaaagagcttcaacaggggagagtgt

SEQ ID NO: 2664 - DNA, 324 bp, synthetic construct
  misc_feature 1..324: note = Synthetic polynucleotide encoding artificial human antibody VL chain
  source 1..324: mol_type = other DNA
tcttctgagctgactcaggaccctgctgtgtctgtggccttgggacagacagtcaggatcacatgccaaggagacagcctcagaacggattatgcaacctggtaccaacagaagccaggacaggcccctatacttgtcttctatggtgaggacaaccggccctcagggatcccagaccgattctctggctccagctcaggaaacacagcttcgttgaccatcactggggctcaggcggaagatgaggctgactattactgtaactcccgggacagcagcggtcaccattgggtgttcggcggagggaccaaactgaccgtccta

SEQ ID NO: 2665 - DNA, 342 bp, synthetic construct
  misc_feature 1..342: note = Synthetic polynucleotide encoding artificial human antibody VL chain
  source 1..342: mol_type = other DNA
gggacatcgtgatgacccagtctccggactccctggccgtgtctctgggcgagagggccaccctcaactgcaagtccagccagagtgttttatccagctacaacaataaggactacttagcttggttccagcagaaaccaggacagcctcctcagttgctcttttactgggcatctacccggaaaaccggagtccctgaccgattcagtggcagcgggtctgggactgatttcactctcaccatcagcagcctgcagactgaagatgtggcagtttattactgtcagcaatattattctactccatacacttttggccaggggaccaagctggagatcaaac

SEQ ID NO: 2666 - DNA, 660 bp, synthetic construct
  misc_feature 1..660: note = Synthetic polynucleotide encoding artificial human antibody VL chain
  source 1..660: mol_type = other DNA
gatgttgtgatgactcagtctccactctccctgcccgttacccttggacaggcggcctccatctcctgcaggtctagtcaaagcctcgtatacagtgatggaaacacctacttgaattggtttcagcagaggcccggccaatctccaaggcgcctaatttataaggtttctaaccgggagtctggggtcccagacagattcagcggcagtgggtcaggcactgatttcacactgcaaatcagcagggtggaggctgaggatgttgggatttattactgcatgcaaggtgcacactggcctccaatcaccttcggccaagggacacgactggagattaaacgaactgtggctgcaccatctgtcttcatcttcccgccatctgatgagcagttgaaatctggaactgcctctgttgtgtgcctgctgaataacttctatcccagagaggccaaagtacagtggaaggtggataacgccctccaatcgggtaactcccaggagagtgtcacagagcaggacagcaaggacagcacctacagcctcagcagcaccctgacgctgagcaaagcagactacgagaaacacaaagtctacgcctgcgaagtcacccatcagggcctgagctcgcccgtcacaaagagcttcaacaggggagagtgt

SEQ ID NO: 2667 - DNA, 322 bp, synthetic construct
  misc_feature 1..322: note = Synthetic polynucleotide encoding artificial human antibody VL chain
  source 1..322: mol_type = other DNA
tcctatgagctgacacagccaccctcggtgtcagtgtccccaggacaaacggccaggatcacctgctctggagatgcattgccaaaaaaatatgttttttggtaccagcagaggtcaggccaggcccctgtgttagtcatctatgaagacagtaaacgaccctccgggatccctgacagattctctggctccagctcagggacactggccaccctcactatcagtggcgcccaggtggaggatgaggctgactactactgttactcaacagacactattggaaattgggtgttcggcggagggaccaggctgaccgtcctag

SEQ ID NO: 2668 - DNA, 642 bp, synthetic construct
  misc_feature 1..642: note = Synthetic polynucleotide encoding artificial human antibody VL chain
  source 1..642: mol_type = other DNA
ctctatgtgctgactcagccaccctcggtgtcagtggccccaggacagacggccaggattacctgtgggggaaacaacattggaagtaaaagtgtgcactggtaccagcagaagccaggccaggcccctgtgctggtcgtctatgatgatagcgaccggccctcagggatccctgagcgattctctggctccaactctgggaacacggccaccctgaccatcagcagggtcgaagccggggatgaggccgactattactgtcaggtgtgggatagtagtagtgatcattggattttcggcggagggaccaagctgaccgtcctaggtcagcccaaggctgccccctcggtcactctgttcccaccctcctctgaggagcttcaagccaacaaggccacactggtgtgtctcataagtgacttctacccgggagccgtgacagtggcctggaaggcagatagcagccccgtcaaggcgggagtggagaccaccacaccctccaaacaaagcaacaacaagtacgcggccagcagctacctgagcctgacgcctgagcagtggaagtcccacaaaagctacagctgccaggtcacgcatgaagggagcaccgtggagaagacagtggcccctacagaatgttca

SEQ ID NO: 2669 - DNA, 644 bp, synthetic construct
  misc_feature 1..644: note = Synthetic polynucleotide encoding artificial human antibody VL chain
  source 1..644: mol_type = other DNA
gtgacatccagatgacccagtctccatcctccctgtctgcatctgttggagacagagtcaccatcacttgccgggcaagtcagagcattagcacctatttaaattggtatcagcagaaaccagggaaagcccctaagctcctgatctatgctgcttccaatttgcagagtggggtcccatcaacgttcagtggcagtggatctgggacagatttcactctcaccatcagcagtctgcaacctgaagattttgcaacttactactgtcaacagagttacagtccccctctcactttcggcggggggaccacggtggagatcaaacgaactgtggctgcaccatctgtcttcatcttcccgccatctgatgagcagttgaaatctggaactgcctctgttgtgtgcctgctgaataacttctatcccagagaggccaaagtacagtggaaggtggataacgccctccaatcgggtaactcccaggagagtgtcacagagcaggacagcaaggacagcacctacagcctcagcagcaccctgacgctgagcaaagcagactacgagaaacacaaagtctacgcctgcgaagtcacccatcagggcctgagctcgcccgtcacaaagagcttcaacaggggagagtgt

SEQ ID NO: 2670 - DNA, 645 bp, synthetic construct
  misc_feature 1..645: note = Synthetic polynucleotide encoding artificial human antibody VL chain
  source 1..645: mol_type = other DNA
gaaatagtgatgacgcagtctccagccaccctgtctgtgtctcagggggaaagagccaccctctcctgcagggccagtcagagtgttggcagcgacttagcctggtaccagcagaaacctggccaggctcccaggctcctcatctatgatgcttccgccagggccactgatatcccagccaggttcagtggcagtgggtctgagacagagttcactctcaccatcagcagcctgcagtctgaagattttgcagtttattactgtcagcattatagtgactggcgagcactcactttcggcggagggaccaaggtggagatcaaacgaactgtggctgcaccatctgtcttcatcttcccgccatctgatgagcagttgaaatctggaactgcctctgttgtgtgcctgctgaataacttctatcccagagaggccaaagtacagtggaaggtggataacgccctccaatcgggtaactcccaggagagtgtcacagagcaggacagcaaggacagcacctacagcctcagcagcaccctgacgctgagcaaagcagactacgagaaacacaaagtctacgcctgcgaagtcacccatcagggcctgagctcgcccgtcacaaagagcttcaacaggggagagtgt

SEQ ID NO: 2671 - DNA, 660 bp, synthetic construct
  misc_feature 1..660: note = Synthetic polynucleotide encoding artificial human antibody VL chain
  source 1..660: mol_type = other DNA
ggcatcgtgatgacccagtctccagactccctggctgtgtctctgggcgagagggccaccatcaactgcaggtccagccagagtgttttatacagctccaacaataagaactacttagcttggtaccagcagaaaccaggacagcctcctaagctgctcatttactgggcatctacccgggaatccggggtccctgaccgattcagtggcagcgggtctgggacagatttcactctcaccatcagcagcctgcaggctgaagatgtggcagtctattactgtcaacaatattatggtcctctgtggacgttcggccaagggaccagggtggaaatcagacgaactgtggctgcaccatctgtcttcatcttcccgccatctgatgagcagttgaaatctggaactgcctctgttgtgtgcctgctgaataacttctatcccagagaggccaaagtacagtggaaggtggataacgccctccaatcgggtaactcccaggagagtgtcacagagcaggacagcaaggacagcacctacagcctcagcagcaccctgacgctgagcaaagcagactacgagaaacacaaagtctacgcctgcgaagtcacccatcagggcctgagctcgcccgtcacaaagagcttcaacaggggagagtgt

SEQ ID NO: 2672 - DNA, 642 bp, synthetic construct
  misc_feature 1..642: note = Synthetic polynucleotide encoding artificial human antibody VL chain
  source 1..642: mol_type = other DNA
tccgatgagctgacacagccaccctcggtgtcagtgtccccaggacagacggccaggatcacctgctctggagatgcattggcaaaggaatatgcttattggtaccagcaaaagtcaggccaggcccctgtattggtgatctctaaagacacggagaggccctcagggatccctgcgcgattttctggctccagttcagggacaacagtcacgttgaccatcagtggagtccagtctgatgacgaggctgactattactgtcaatcagcagacagcagtcttacttattggctcttcggcggagggaccaagctgaccgtcctacgtcagcccaaggctgccccctcggtcactctgttcccgccctcctctgaggagcttcaagccaacaaggccacactggtgtgtctcataagtgacttctacccgggagccgtgacagtggcctggaaggcagatagcagccccgtcaaggcgggagtggagaccaccacaccctccaaacaaagcaacaacaagtacgcggccagcagctacctgagcctgacgcctgagcagtggaagtcccacaaaagctacagctgccaggtcacgcatgaagggagcaccgtggagaagacagtggcccctacagaatgttca

SEQ ID NO: 2673 - DNA, 319 bp, synthetic construct
  misc_feature 1..319: note = Synthetic polynucleotide encoding artificial human antibody VL chain
  source 1..319: mol_type = other DNA
gacatccagatgacccaggctccttccaccctgtctgcatctgttggagacagagtcagcatcacttgccgggccagtcagaatattcgcgacttcttggcctggtatcagcagaaaccagggagagcccctgacctcctcatctatcgggcatctactttagaaaaaggggtgtcggcgaggttcagcggcagtgggtctgggacagaattcactctaaccatcaccggcctgcagcctgatgattttgcaacatattactgccaacaatattccgattactccactttcggcggagggaccagggtggagatcaaac

SEQ ID NO: 2674 - DNA, 660 bp, synthetic construct
  misc_feature 1..660: note = Synthetic polynucleotide encoding artificial human antibody VL chain
  source 1..660: mol_type = other DNA
gacatcgtgatgacccagtctccagactccctggctgtgtctctgggcgagagggccaccatcacctgcaagtccagccagactattttatacagctccaacaataagaactatttagcttggtaccagcagaaaccaggacagcctcctaaactactcatttactgggcatctacccgggaatccggggtccctgaccggttcagtggcagcgggtctgggacagatttcactctcaccatcagcagcctgcaggctgaagatgtggcagtttattactgtcaccaatattatactactcctttcactttcggccctgggaccactgtggatatcagacgaactgtggctgcaccatctgtcttcatcttcccgccatctgatgagcagttgaaatctggaactgcctctgttgtgtgcctgctgaataacttctatcccagagaggccaaagtacagtggaaggtggataacgccctccaatcgggtaactcccaggagagtgtcacagagcaggacagcaaggacagcacctacagcctcagcagcaccctgacgctgagcaaagcagactacgagaaacacaaagtctacgcctgcgaagtcacccatcagggcctgagctcgcccgtcacaaagagcttcaacaggggagagtgt

SEQ ID NO: 2675 - DNA, 636 bp, synthetic construct
  misc_feature 1..636: note = Synthetic polynucleotide encoding artificial human antibody VL chain
  source 1..636: mol_type = other DNA
tcctatgagctgactcagccaccctcagtgtccgtgtccccaggacagacagccagcatcacctgctctggagataaattggggaataaatatgtttgctggtatcagcagaagccaggccagtcccctgtgttggtcatctatcaggataccaagcggccctcagggatccctgagcgattctctggctccaagtctgggaacacagccactctgaccatcagcgggacccaggctctggatgaggctgactattactgtcaggcgtgggacagcagcactgcagaattcggcggagggaccaagctgaccgtcctaggtcagcccaaggctgccccctcggtcactctgttcccgccctcctctgaggagcttcaagccaacaaggccacactggtgtgtctcataagtgacttctacccgggagccgtgacagtggcctggaaggcagatagcagccccgtcaaggcgggagtggagaccaccacaccctccaaacaaagcaacaacaagtacgcggccagcagctatctgagcctgacgcctgagcagtggaagtcccacagaagctacagctgccaggtcacgcatgaagggagcaccgtggagaagacagtggcccctacagaatgttca

SEQ ID NO: 2676 - DNA, 648 bp, synthetic construct
  misc_feature 1..648: note = Synthetic polynucleotide encoding artificial human antibody VL chain
  source 1..648: mol_type = other DNA
cggtctgtgctgactcagccaccctcagcgtctgggactcccgggcagacggtcaccatctcttgttctggtagcaggtccaacatcgggagtaattttgtgtattggtaccaacacctcccaggatcggcccccaaaacgaccatccattctaatactcagcggccccccggggtccctgatcgattttctggctccaagtctggcacctcagcctccctggccatcagtgggctccggtctgaagatgaggctgattattactgtgtgacatgggatgacgacctgcatggttgggtgttcggcggagggaccaggctgaccgtcctaggtcagcccaaggctgccccctcggtcactctgttcccgccctcctctgaggagcttcaagccaacaaggccacactggtgtgtctcataagtgacttctacccgggagccgtgacagtggcctggaaggcagatagcagccccgtcaaggcgggagtggagaccaccacaccctccaaacaaagcaacaacaagtacgcggccagcagctacctgagcctgacgcctgagcagtggaagtcccacaaaagctacagctgccaggtcacgcatgaagggagcaccgtggagaagacagtggcccctacagaatgttca

SEQ ID NO: 2677 - DNA, 654 bp, synthetic construct
  misc_feature 1..654: note = Synthetic polynucleotide encoding artificial human antibody VL chain
  source 1..654: mol_type = other DNA
cggtctgtgttgacgcagccgccctcagtgtctgcggccccaggacagaaggtcatcatctcctgctctggaagcagctccaacattgggaataactatgtttcctggtaccagcaattcctaggaacagcccccaaactcctcatttatgacactgataagcgaccctcagggattcctgaccgattctctggctccaagtctggcacgtcagccaccctgggcattaccgggctccagactggggacgaggcccattattactgcgcaacgtgggatagcagcctgcgtgctggccctgtagtattcggcggagggacgaaattgaccgtcctaggtcagcccaaggctgccccctcggtcactctgttcccgccctcctctgaggagcttcaagccaacaaggccacactggtgtgtctcataagtgacttctacccgggagccgtgacagtggcctggaaggcagatagcagccccgtcaaggcgggagtggagaccaccacaccctccaaacaaagcaacaacaaatacgcggccagcagctatctgagcctgacgcctgagcagtggaagtcccacagaagctacagctgccaggtcacgcatgaagggagcaccgtggagaagacagtggcccctacagaatgttca

SEQ ID NO: 2678 - DNA, 642 bp, synthetic construct
  misc_feature 1..642: note = Synthetic polynucleotide encoding artificial human antibody VL chain
  source 1..642: mol_type = other DNA
gacatccagatgacccaatctccttccaccctgtctgcatctgtaggagacagagtcaccatcacttgccgggccagccagagtgttagtttctggttggcctggtatcagcagaaaccagggaaagcccctaacctcctgatcagtaaggcgtctactttagaaagtggagtcccctcaagatttagcggcagtggctctgggacagaattcactctcaccatcagcagcctgcagcctgatgatttcgcaacttattactgccaacagtacaatgcttacccggtcactttcggcggggggaccaaggtggagatcagacgaactgtggctgcaccatctgtcttcatcttcccgccatctgatgagcagttgaaatctggaactgcctctgttgtgtgcctgctgaataacttctatcccagagaggccaaagtacagtggaaggtggataacgccctccaatcgggtaactcccaggagagtgtcacagagcaggacagcaaggacagcacctacagcctcagcagcaccctgacgctgagcaaagcagactacgagaaacacaaagtctacgcctgcgaagtcacccatcagggcctgagctcgcccgtcacaaagagcttcaacaggggagagtgt

SEQ ID NO: 2679 - DNA, 660 bp, synthetic construct
  misc_feature 1..660: note = Synthetic polynucleotide encoding artificial human antibody VL chain
  source 1..660: mol_type = other DNA
ggcatcgtgatgatccagtctccagactccctggctgtgtctctgggcgagagggccaccatcaactgcaagtccagccagagtgtcttctacagctccaacaataagaactacttagcttggtaccagcagaaaccaggacagcctcctaaactgctcatttactgggcatctacccgggaatccggggtccctgaccgattcagtggcagcgggtctgggacagatttcactctcaccctcaccagcctgcaggctgaagatgtggcagtttattactgtcaacaatattatagtactccgtggacgttcggccaagggaccaaggtggaaatcaaacgaactgtggctgcaccatctgtcttcatcttcccgccatctgatgagcagttgaaatctggaactgcctctgttgtgtgcctgctgaataacttctatcccagagaggccaaagtacagtggaaggtggataacgccctccaatcgggtaactcccaggagagtgtcacagagcaggacagcaaggacagcacctacagcctcagcagcaccctgacgctgagcaaagcagactacgagaaacacaaagtctacgcctgcgaagtcacccatcagggcctgagctcgcccgtcacaaagagcttcaacaggggagagtgt

SEQ ID NO: 2680 - DNA, 662 bp, synthetic construct
  misc_feature 1..662: note = Synthetic polynucleotide encoding artificial human antibody VL chain
  source 1..662: mol_type = other DNA
gggacatcgtgatgacccagtctccagactccctggctgtgtctctgggcgagagggccgccatcaactgcaagtccagccagagtgttttatacagctccaacaataagaactacttagcttggtaccagcagagaccaggacagcctcctaagctgctcattcactgggcatctatgcgggaatccggggtccctgaccgattcagtggcagcgggtctgggacagatttcactctcaccatcagcagcctgcaggctgaagatgtggcaatttattactgtcagcaatattatagtcctcctctcactttcggcggagggaccaaggtggagatcaaacgaactgtggctgcaccatctgtcttcatcttcccgccatctgatgagcagttgaaatctggaactgcctctgttgtgtgcctgctgaataacttctatcccagagaggccaaagtacagtggaaggtggataacgccctccaatcgggtaactcccaggagagtgtcacagagcaggacagcaaggacagcacctacagcctcagcagcaccctgacgctgagcaaagcagactacgagaaacacaaagtctacgcctgcgaagtcacccatcagggcctgagctcgcccgtcacaaagagcttcaacaggggagagtgt

SEQ ID NO: 2681 - DNA, 330 bp, synthetic construct
  misc_feature 1..330: note = Synthetic polynucleotide encoding artificial human antibody VL chain
  source 1..330: mol_type = other DNA
cagtctgccctgactcagcctgcctccgtgtctgggtctcctggacagtcgatcaccatctcttgcactggaagcagcaatgacattggtcgttataagtatgtctcctggttccaacatcacccaggcagagcccccaaactcataatttatgaggtcaataatcggccctcagggctttctcatcgcttctctggctccaagtctggcaacacggcctccctgaccatctctgggctccaggctgaggacgaggctgattattactgctgctcatatacaagcagcctcacttatgtcttcggaactgggaccgcggtcaccgtccta

SEQ ID NO: 2682 - DNA, 657 bp, synthetic construct
  misc_feature 1..657: note = Synthetic polynucleotide encoding artificial human antibody VL chain
  source 1..657: mol_type = other DNA
gatgttgtgatgactcagtctccactctccctgcccgtcacccttggacagccggcctccatctcctgcaggtctagtcaaagcctcgtatacagtgatggaaacacctacttgaattggtttcagcagaggccaggccaatctccaaggcgcctaatttataaggtttctaaccgggactctggggtcccagacagattcagcggcagtgggtcaggcactgatttcacactgaaaatcagcagggtggaggctgaggatgttggggtttattactgcatgcaaggtacacactggccgtacacttttggccaggggaccaagctggagatcaaacgaactgtggctgcaccatctgtcttcatcttcccgccatctgatgagcagttgaaatctggaactgcctctgttgtgtgcctgctgaataacttctatcccagagaggccaaagtacagtggaaggtggataacgccctccaatcgggtaactcccaggagagtgtcacagagcaggacagcaaggacagcacctacagcctcagcagcaccctgacgctgagcaaagcagactacgagaaacacaaagtctacgcctgcgaagtcacccatcagggcctgagctcgcccgtcacaaagagcttcaacaggggagagtgt

SEQ ID NO: 2683 - DNA, 636 bp, synthetic construct
  misc_feature 1..636: note = Synthetic polynucleotide encoding artificial human antibody VL chain
  source 1..636: mol_type = other DNA
ccctatgagctgactcagccaccctcagtgtccgtgtccccaggacagacagccagcatcacctgctctggagataaattgggggataaatatgcttgctggtatcagcagaagccaggccagtcccctgtgctggtcatctatcaagatagcaagcggccctcagggatccctgagcgattctctggctccaactctgggaacacagccactctgaccatcagcgggacccaggctatggatgaggctgactattactgtcaggcgtgggacagcagcacttatgtcttcggaactgggaccaaggtcaccgtcctaggtcagcccaaggccaaccccactgtcactctgttcccgccctcctctgaggagctccaagccaacaaggccacactagtgtgtctgatcagtgacttctacccgggagctgtgacagtggcctggaaggcagatggcagccccgtcaaggcgggagtggagaccaccaaaccctccaaacagagcaacaacaagtacgcggccagcagctacctgagcctgacgcccgagcagtggaagtcccacagaagctacagctgccaggtcacgcatgaagggagcaccgtggagaagacagtggcccctacagaatgttca

SEQ ID NO: 2684 - DNA, 648 bp, synthetic construct
  misc_feature 1..648: note = Synthetic polynucleotide encoding artificial human antibody VL chain
  source 1..648: mol_type = other DNA
gaaaatgtgttgacgcagtctccaggcaccctgtctttgtctccaggggaaagagccaccctctcctgcagggccagtcagagggttaacagcaactacttagcctggtaccagcagaaatctggccaggctcccaggctcctcatctatggtgcatccagcagggccactggtatcccagacaggttcagtggcagtgggtctgggacagacttcactctcaccatcagcagactggagcctgaagattttgcagtgtattactgtcagcagtatggtggctcacctctattcactttcggccctgggaccaaagtggatatcaaacgaactgtggctgcaccatctgtcttcatcttcccgccatctgatgagcagttgaaatctggaactgcctctgttgtgtgcctgctgaataacttctatcccagagaggccaaagtacagtggaaggtggataacgccctccaatcgggtaactcccaggagagtgtcacagagcaggacagcaaggacagcacctacagcctcagcagcaccctgacgctgagcaaagcagactacgagaaacacaaactctacgcctgcgaagtcacccatcagggcctgagctcgcccgtcacaaagagcttcaacaggggagagtgt

SEQ ID NO: 2685 - DNA, 319 bp, synthetic construct
  misc_feature 1..319: note = Synthetic polynucleotide encoding artificial human antibody VL chain
  source 1..319: mol_type = other DNA
ccctatgaactgactcagccaccctcagtgtccgtgtccccaggacagacagccagcatcgcctgctctggagataatttgggaaataaatatgcttggtggtatcgacagaagccaggccagtcccctgtcctggtcatgtataaagataacaagcggccctcagggatccctgagcgattctctggctccaactctgggaacacagccactctgaccatcagcgggacccaggctatggatgaggctgactattactgtcagacgtgggacagcagcactgtgatattcggcggagggaccaagctgaccgtccaag

SEQ ID NO: 2686 - DNA, 659 bp, synthetic construct
  misc_feature 1..659: note = Synthetic polynucleotide encoding artificial human antibody VL chain
  source 1..659: mol_type = other DNA
gggatattgtgatgactcagtctccactctccctgcccgtcacccctggagagccggcctccatctcctgcaggtctagtcagagcctcctgcatagtaatggatacaactatttggattggtacctgcagaagccagggcagtctccacagctcctgatctatttgggttctaatcgggcctccggggtccctgacaggttcagtggcagtggatcaggcacagattttacactgaaaatcagcagagtggaggctgaggatgttggggtttattactgcatgcaagctctacaaactccgtacacttttggccaggggaccaagctggagatcaaacgaactgtggctgcaccatctgtcttcatcttcccgccatctgatgagcagttgaaatctggaactgcctctgttgtgtgcctgctgaataacttctatcccagagaggccaaagtacagtggaaggtggataacgccctccaatcgggtaactcccaggagagtgtcacagagcaggacagcaaggacagcacctacagcctcagcagcaccctgacgctgagcaaagcagactacgagaaacacaaagtctacgcctgcgaagtcacccatcagggcctgagctcgcccgtcacaaagagcttcaacaggggagagtgt

SEQ ID NO: 2687 - DNA, 648 bp, synthetic construct
  misc_feature 1..648: note = Synthetic polynucleotide encoding artificial human antibody VL chain
  source 1..648: mol_type = other DNA
cagtctgtgttgacgcagccgccctcagtgtctgcggccccaggacagaaggtcaccatctcctgctctggaagcagctccaacattgggaataattatgtatcctggtaccagcagctcccaggaacagcccccaaactcctcatttatgacaataataagcgaccctcagggattcctgaccgattctctggctccaagtctggcacgtcagccaccctgggcatcaccggactccagactggggacgaggccgattattactgcggaacatgggatagcagtctgagtgctggcgtcttcggaactgggaccaaggtcaccgtcctaggtcagcccaaggccaaccccactgtcactctgttcccgccctcctctgaggagctccaagccaacaaggccacactagtgtgtctgatcagtgacttctacccgggagccgtgacagtggcctggaaggcagatagcagccccgtcaaggcgggagtggagaccaccacaccctccaaacaaagcaacaacaagtacgcggccagcagctacctgagcctgacgcctgagcagtggaagtcccacagaagctacagctgccaggtcacgcatgaagggagcaccgtggagaagacagtggcccctacagaatgttca

SEQ ID NO: 2688 - DNA, 641 bp, synthetic construct
  misc_feature 1..641: note = Synthetic polynucleotide encoding artificial human antibody VL chain
  source 1..641: mol_type = other DNA
gtgacatccagatgacccagtctccttccaccctgtctgcatctgtaggagacagagtcaccatcacttgccgggccagtcagagtattagtagctggttggcctggtatcagcagaaaccagggaaagcccctaagctcctgatctataaggcgtctagtttagaaagtggggtcccatcaaggttcagcggcagtggatctgggacagaattcactctcaccatcagcagcctgcagcctgatgattttgcaacttattactgccaacagtataatagttattggacgttcggccaagggaccaaggtggaaatcaaacgaactgtggctgcaccatctgtcttcatcttcccgccatctgatgagcagttgaaatctggaactgcctctgttgtgtgcctgctgaataacttctatcccagagaggccaaagtacagtggaaggtggataacgccctccaatcgggtaactcccaggagagtgtcacagagcaggacagcaaggacagcacctacagcctcagcagcaccctgacgctgagcaaagcagactacgagaaacacaaagtctacgcctgcgaagtcacccatcagggcctgagctcgcccgtcacaaagagcttcaacaggggagagtgt

SEQ ID NO: 2689 - DNA, 644 bp, synthetic construct
  misc_feature 1..644: note = Synthetic polynucleotide encoding artificial human antibody VL chain
  source 1..644: mol_type = other DNA
gtgacatccagatgacccagtctccttccaccctgtctgcatctgtaggagacagagtcaccatcacttgccgggccagtcagagtattagtagctggttggcctggtatcagcagaaaccagggaaagcccctaagctcctgatctataaggcgtctagtttagaaagtggggtcccatcaaggttcagcggcagtggatctgggacagaattcactctcaccatcagcagcctgcagcctgatgattttgcaacttattactgccaacagtataatagttatccgtggacgttcggccaagggaccaaggtggaaatcaaacgaactgtggctgcaccatctgtcttcatcttcccgccatctgatgagcagttgaaatctggaactgcctctgttgtgtgcctgctgaataacttctatcccagagaggccaaagtacagtggaaggtggataacgccctccaatcgggtaactcccaggagagtgtcacagagcaggacagcaaggacagcacctacagcctcagcagcaccctgacgctgagcaaagcagactacgagaaacacaaagtctacgcctgcgaagtcacccatcagggcctgagctcgcccgtcacaaagagcttcaacaggggagagtgt

SEQ ID NO: 2690 - DNA, 654 bp, synthetic construct
  misc_feature 1..654: note = Synthetic polynucleotide encoding artificial human antibody VL chain
  source 1..654: mol_type = other DNA
ccagctgtgctgacgcagccgccctcagtgtctggggccccagggcagagggtcaccatctcctgcactgggagcagctccaacatcggggcaggttatgatgtacactggtaccagcagcttccaggaacagcccccaaactcctcatctatggtaacagcaatcggccctcaggggtccctgaccgattctctggctccaagtctggcacctcagcctccctggccatcactgggctccaggctgaggatgaggctgattattactgccagtcctatgacagcagcctgagtggttcaggggtgttcggcggagggaccaagctgaccgtcctaggtcagcccaaggctgccccctcggtcactctgttcccaccctcctctgaggagcttcaagccaacaaggccacactggtgtgtctcataagtgacttctacccgggagccgtgacagtggcctggaaggcagatagcagccccgtcaaggcgggagtggagaccaccacaccctccaaacaaagcaacaacaagtacgcggccagcagctacctgagcctgacgcctgagcagtggaagtcccacaaaagctacagctgccaggtcacgcatgaagggagcaccgtggagaagacagtggcccctacagaatgttca

SEQ ID NO: 2691 - DNA, 639 bp, synthetic construct
  misc_feature 1..639: note = Synthetic polynucleotide encoding artificial human antibody VL chain
  source 1..639: mol_type = other DNA
tcctatgagctgacacagccaccctcggtgtcagtgtccccaggacagacggccaggatcacctgctctggagatgcattgccaaagcaatatgcttattggtaccagcagaagccaggccaggcccctgtgttggtgatatataaagacagtgagaggccctcagggatccctgagcgattctctggctccagctcagggacaacagtcacgttgaccatcagtggagtccaggcagaagacgaggctgactattactgtcaatcagcagacagcagtggtacttatgtcttcggaactgggaccaaggtcaccgtcctaggtcagcccaaggccaaccccactgtcactctgttcccgccctcctctgaggagctccaagccaacaaggccacactagtgtgtctgatcagtgacttctacccgggagctgtgacagtggcctggaaggcagatggcagccccgtcaaggcgggagtggagaccaccaaaccctccaaacagagcaacaacaagtacgcggccagcagctacctgagcctgacgcccgagcagtggaagtcccacagaagctacagctgccaggtcacgcatgaagggagcaccgtggagaagacagtggcccctacagaatgttca

SEQ ID NO: 2692 - DNA, 308 bp, synthetic construct
  misc_feature 1..308: note = Synthetic polynucleotide encoding artificial human antibody VL chain
  source 1..308: mol_type = other DNA
gacatccagatgacccagtctccatcttccctgtctgcatctgtcggagacagagtcaccttcacttgtcgggcgagtcagaatattcgcaacaatttagcctggtatcagctcaaaccagggaaagccccgcagctcctgatctattctgcttccagtttggagactggggtcccttcaaggttcagcggctctggatctggaacagatttcactctcgccatcagcagcctgcagcctgaagattttgcgacttactattgtcaacaggctcacggtttcccaatcacttttgggcaggggagcaa

SEQ ID NO: 2693 - DNA, 319 bp, synthetic construct
  misc_feature 1..319: note = Synthetic polynucleotide encoding artificial human antibody VL chain
  source 1..319: mol_type = other DNA
gaaatagtgatgacgcagtctccagccaccctgtctgtgtctcccggggaaagagccaccctctcctgcagggccagtcagagtgttagcagcaacttagcctggtaccagcagaaacctggccaggctcccaggctcctcatctatggtgcatccaccagggccactggtatcccagccaggttcagtggcagtgggtctgggacagagttcactctcaccatcagcagcctgcagtctgaagattttgcaatttattactgtcagcagtataatagctggcccgctttcggcggagggaccaaggtggagatcaaac

SEQ ID NO: 2694 - DNA, 642 bp, synthetic construct
  misc_feature 1..642: note = Synthetic polynucleotide encoding artificial human antibody VL chain
  source 1..642: mol_type = other DNA
gacatccagatgacccagtctccatcctccctgtctgcatctgtaggagacagagtcaccatcacttgccgggcaagtcagagcattagcagctatttaaattggtatcagcagaaaccagggaaagcccctaagctcctgatctatgctgcatccagtttgcaaagtggggtcccatcaaggttcagtggcagtggatctgggacagatttcactctcaccgtcagcagtctacaacctgaagactttgcaacttactactgtcaacagagttacaataccccgtacacttttggccaggggaccaagctggagatcaaacgaactgtggctgcaccatctgtcttcatcttcccgccatctgatgagcagttgaaatctggaactgcctctgttgtgtgcctgctgaataacttctatcccagagaggccaaagtacagtggaaggtggataacgccctccaatcgggtaactcccaggagagtgtcacagagcaggacagcaaggacagcacctacagcctcagcagcaccctgacgctgagcaaagcagactacgagaaacacaaagtctacgcctgcgaagtcacccatcagggcctgagctcgcccgtcacaaagagcttcaacaggggagagtgt

SEQ ID NO: 2695 - DNA, 644 bp, synthetic construct
  misc_feature 1..644: note = Synthetic polynucleotide encoding artificial human antibody VL chain
  source 1..644: mol_type = other DNA
gtgacatccagatgacccagtctccatcctccctgtctgcatctgtaggagacagagtcaccatcacttgccgggcaagtcagagcattagcacctatttaaattggtatcagcagaaaccagggatggcccctaagctcctgatctatgctgcatccactttgcaaagtggggtcccatcaaggttcagtggcagtggatctgcgacagattacactctcaccatcagcagtctgcaacctgaagatttcgcgacttactactgtcaacagagttacaataccccgctcactttcggcggagggaccaaggtggacatcaaacgaactgtggctgcaccatctgtcttcatcttcccgccatctgatgagcagttgaaatctggaactgcctctgttgtgtgcctgctgaataacttctatcccagagaggccaaagtacagtggaaggtggataacgccctccaatcgggtaactcccaggagagtgtcacagagcaggacagcaaggacagcacctacagcctcagcagcaccctgacgctgagcaaagcagactacgagaaacacaaactctacgcctgcgaagtcacccatcagggcctgagctcgcccgtcacaaagagcttcaacaggggagagtgt

SEQ ID NO: 2696 - DNA, 648 bp, synthetic construct
  misc_feature 1..648: note = Synthetic polynucleotide encoding artificial human antibody VL chain
  source 1..648: mol_type = other DNA
gaaattgtgttgacgcagtctccaggcaccctgtctttgtctccaggggaaagagccaccctctcctgcagggccagtcagagtgttaccagcagctacttagcctggtaccagcagaaacctggccaggctcccaggctcctcatctatggtgcatccagcagggccactggcatcccagacaggttcagtggcagtgggtctgggacagacttcactctcaccatcagcagactggagcctgaagattttgcagtgtattactgtcagcagtatggtagctcacctccgaacagttttggccaggggaccaagctggagatcaaacgaactgtggctgcaccatctgtcttcatcttcccgccatctgatgagcagttgaaatctggaactgcctctgttgtgtgcctgctgaataacttctatcccagagaggccaaagtacagtggaaggtggataacgccctccaatcgggtaactcccaggagagtgtcacagagcaggacagcaaggacagcacctacagcctcagcagcaccctgacgctgagcaaagcagactacgagaaacacaaagtctacgcctgcgaagtcacccatcagggcctgagctcgcccgtcacaaagagcttcaacaggggagagtgt

SEQ ID NO: 2697 - DNA, 325 bp, synthetic construct
  misc_feature 1..325: note = Synthetic polynucleotide encoding artificial human antibody VL chain
  source 1..325: mol_type = other DNA
tcctatgtgctgactcagccaccctcagtgtcagtggccccaggaaagacggccaggattacctgtgggggaaacaacattggaagtaaaagtgtgcactggtaccagcagaagccaggccaggcccctgtgctggtcatctattatgatagagacaggccctcagggatccctgagcgattctctggctccaactctgggaacacggccaccctgaccatcagcagggtcgaagccggggatgaggccgactattactgtcaggtgtgggatagtagtagtgatcatccggtattcggcggagggaccaagctgaccgtcctag

SEQ ID NO: 2698 - DNA, 651 bp, synthetic construct
  misc_feature 1..651: note = Synthetic polynucleotide encoding artificial human antibody VL chain
  source 1..651: mol_type = other DNA
aattttatgctgactcagccccactctgtgtcggagtctccggggaagacggtaaccatctcctgcacccgcagcagtggcagcattgccgacaagtatgtccactggtaccggcagcgcccgggcagctcccccaccattgtgatctatgaggataaacaaaggccctctggggtccctgatcgggtctctggcgccatcgacacctcctccaactctgcctccctcaccatctctggactgaagactgaggacgaggctgactactactgtcagtcttatgatagcaacactcattgggtgttcggcggagggaccaagctgaccgtcctaggtcagcccaaggctgccccctcggtcactctgttcccgccctcctctgaggagcttcaagccaacaaggccacactggtgtgtctcataagtgacttctacccgggagccgtgacagtggcctggaaggcagatagcagccccgtcaaggcgggagtggagaccaccacaccctccaaacaaagcaacaacaagtacgcggccagcagctacctgagcctgacgcctgagcagtggaagtcccacagaagctacagctgccaggtcacgcatgaagggagcaccgtggagaagacagtggcccctacagaatgttca

SEQ ID NO: 2699 - DNA, 657 bp, synthetic construct
  misc_feature 1..657: note = Synthetic polynucleotide encoding artificial human antibody VL chain
  source 1..657: mol_type = other DNA
gatattgtgatgactcagtctccactctccctgcccgtcacccctggagagccggcctccatctcctgcaggtctagtcagagcctcctacatagtaatggatacaactatttggattggtacctgcagaagccagggcagtctccacagctcctgatctatttgggttctaatcgggcctccggggtccctgacaggttcagtggtagtggatcaggcacagattttacactgaaaatcagcagagtggaggctgaggatgttggggtttattactgcatgcaagctctagaaactcctcgcactttcggcggagggaccaaggtggagatcaaacgaactgtggctgcaccatctgtcttcatcttcccgccatctgatgagcagttgaaatctggaactgcctctgttgtgtgcctgctgaataacttctatcccagagaggccaaagtacagtggaaggtggataacgccctccaatcgggtaactcccaggagagtgtcacagagcaggacagcaaggacagcacctacagcctcagcagcaccctgacgctgagcaaagcagactacgagaaacacaaagtctacgcctgcgaagtcacccatcagggcctgagctcgcccgtcacaaagagcttcaacaggggagagtgt

SEQ ID NO: 2700 - DNA, 641 bp, synthetic construct
  misc_feature 1..641: note = Synthetic polynucleotide encoding artificial human antibody VL chain
  source 1..641: mol_type = other DNA
gtgacatccagatgacccagtctccttccaccctgtctgcatctgtaggagacagagtcaccatcacttgccgggccagtcagagtattagtagctggttggcctggtatcagcagaaaccagggaaagcccctaagctcctgatctataaggcgtctagtttagaaagtggggtcccatcaaggttcagcggcagtggatctgggacagaattcactctcaccatcagcagcctgcagcctgatgattttgcaacttattactgccaacagtataatagttattcgacgttcggccaagggaccaaggtggaaatcaaacgaactgtggctgcaccatctgtcttcatcttcccgccatctgatgagcagttgaaatctggaactgcctctgttgtgtgcctgctgaataacttctatcccagagaggccaaagtacagtggaaggtggataacgccctccaatcgggtaactcccaggagagtgtcacagagcaggacagcaaggacagcacctacagcctcagcagcaccctgacgctgagcaaagcagactacgagaaacacaaagtctacgcctgcgaagtcacccatcagggcctgagctcgcccgtcacaaagagcttcaacaggggagagtgt

SEQ ID NO: 2701 - DNA, 657 bp, synthetic construct
  misc_feature 1..657: note = Synthetic polynucleotide encoding artificial human antibody VL chain
  source 1..657: mol_type = other DNA
ggaattgcaatgactcagtctccacgctccctgcccgtcacccctggagagccggcctccatctcctgcaggtctagtcagagcctcctgtatcgtgatggagagcactatttggattggtacctacagaagccagggcagtctccacacctcctgatctactcgggatctaatcgggcctccggggtccctgacaggttcagtggcagtggatcaggcacagattttacactaataatcagcagagtggaggctgaggatgctggggtctattactgcatgcaagctctacaacctccgtacactttcggccaggggaccaagctggagatcacacgaactgtggctgcaccatctgtcttcatcttcccgccatctgatgagcagttgaaatctggaactgcctctgttgtgtgcctgctgaataacttctatcccagagaggccaaagtacagtggaaggtggataacgccctccaatcgggtaactcccaggagagtgtcacagagcaggacagcaaggacagcacctacagcctcagcagcaccctgacgctgagcaaagcagactacgagaaacacaaactctacgcctgcgaagtcacccatcagggcctgagctcgcccgtcacaaagagcttcaacaggggagagtgt

SEQ ID NO: 2702 - DNA, 647 bp, synthetic construct
  misc_feature 1..647: note = Synthetic polynucleotide encoding artificial human antibody VL chain
  source 1..647: mol_type = other DNA
gtgacatccagatgacccagtctccatcctccctgcctgcatctgtaggagacagagtcaccatcacttgccgggcaagtcagagcattagtagctatttaaattggtatcaaaagaaaccagggaaagcccctaagctcctgatcgatgctgcatccagtttgcaaagtggggtcccatcaaggttcagtggcagtggatctgggacagatttcactctcaccatcagcagtctgcaacctgaagattttgcaacttactactgtcaacagagttacagtacccctccgtggacgttcggccaagggaccaaggtggaaatcaaacgaactgtggctgcaccatctgtcttcatcttcccgccatctgatgagcagttgaaatctggaactgcctctgttgtgtgcctgctgaataacttctatcccagagaggccaaagtacagtggaaggtggataacgccctccaatcgggtaactcccaggagagtgtcacagagcaggacagcaaggacagcacctacagcctcagcagcaccctgacgctgagcaaagcagactacgagaaacacaaagtctacgcctgcgaagtcacccatcagggcctgagctcgcccgtcacaaagagcttcaacaggggagagtgt

SEQ ID NO: 2703 - DNA, 660 bp, synthetic construct
  misc_feature 1..660: note = Synthetic polynucleotide encoding artificial human antibody VL chain
  source 1..660: mol_type = other DNA
gacatcgtgatgacccagtctccagactccctgtctctgtctctgggcgagagggccaccatcaactgcaagtccagccagagtcttttatacagttccaactataagaactacttagcttggtaccaacagaaaccaggacagcctcctaaattgctcatttactgggcatctacccgggagtccggggtccctgaccgattcagtggcagcgggtctgggacagatttcactctcaccatcagcagcctgcaggctgaagatgtggcagtttattactgtcagcaatattatcttgttcccgtcaccttcggccaagggacacgactggacattaaacgaactgtggctgcaccatctgtcttcatcttcccgccatctgatgagcagttgaaatctggaactgcctctgttgtgtgcctgctgaataacttctatcccagagaggccaaagtacagtggaaggtggataacgccctccaatcgggtaactcccaggagagtgtcacagagcaggacagcaaggacagcacctacagcctcagcagcaccctgacgctgagcaaagcagactacgagaaacacaaagtctacgcctgcgaagtcacccatcagggcctgagctcgcccgtcacaaagagcttcaacaggggagagtgt

SEQ ID NO: 2704 - DNA, 651 bp, synthetic construct
  misc_feature 1..651: note = Synthetic polynucleotide encoding artificial human antibody VL chain
  source 1..651: mol_type = other DNA
gcctctgtgctgactcagccaccctcagcgtctgggacccccgggcagagggtcaccatctcttgttctggaagcagctccaacatcggaagtaattatgtatactggtaccagcagctcccaggaacggcccccaaactcctcatctataggaataatcagcggccctcaggggtccctgaccgattctctggctccaagtctggcacctcagcctccctggccatcagtgggctccggtccgaggatgaggctgattattactgtgcagcatgggatgacagcctgagtggcccttatgtcttcggaactgggaccaaggtcaccgtcctaggtcagcccaaggccaaccccactgtcactctgttcccgccctcctctgaggagcttcaagccaacaaggccacactagtgtgtctgatcagtgacttctacccgggagctgtgacagtggcctggaaggcagatggcagccccgtcaaggcgggagtggagaccaccaaaccctccaaacagagcaacaacaagtacgcggccagcagctacctgagcctgacgcccgagcagtggaagtcccacagaagctacagctgccaggtcacgcatgaagggagcaccgtggagaagacagtggcccctacagaatgttca

SEQ ID NO: 2705 - DNA, 651 bp, synthetic construct
  misc_feature 1..651: note = Synthetic polynucleotide encoding artificial human antibody VL chain
  source 1..651: mol_type = other DNA
cagtctgccctgactcagcctccctccgcgtccgggtctcctggacagtcagtcaccatctcctgcactggaaccagcagtgacgttggtggttataactatgtctcctggtaccaacagcacccaggcaaagcccccaaactcatgatttatgaggtcagtaagcggccctcaggggtccctgatcgcttctctggctccaagtctggcaacacggcctccctgaccgtctctgggctccaggctgaggatgaggctgattattactgcagctcatatgcaggcagcaacaatttttatgtcttcggaactgggaccaaggtcaccgtcctaggtcagcccaaggccaaccccactgtcactctgttcccgccctcctctgaggagctccaagccaacaaggccacactagtgtgtctgatcagtgacttctacccgggagctgtgacagtggcctggaaggcagatggcagccccgtcaaggcgggagtggagaccaccaaaccctccaaacagagcaacaacaagtacgcggccagcagctacctgagcctgacgcccgagcagtggaagtcccacagaagctacagctgccaggtcacgcatgaagggagcaccgtggagaagacagtggcccctacagaatgttca

SEQ ID NO: 2706 - DNA, 654 bp, synthetic construct
  misc_feature 1..654: note = Synthetic polynucleotide encoding artificial human antibody VL chain
  source 1..654: mol_type = other DNA
cagtctgtgctgacgcagccgccctcagtgtctggggccccagggcagagggtcaccatctcctgcactgggagcaactccaacatcggggcaggttatgatgtacactggtatcagcagcttccaggagcagcccccaaactcctcatctatggtaacggcaatcggccctcaggggtccctgaccgattctctggctccaagtctgacacctcagcctccctggccatcactgggctccaggctgacgatgaggctgattattactgccagtcctatgacagcagcctgagtggttcaatgatattcggcggagggaccaagctgaccgtcctaggtcagcccaaggctgccccctcggtcactctgttcccgccctcctctgaggagcttcaagccaacaaggccacactggtgtgtctcataagtgacttctacccgggagccgtgacagtggcctggaaggcagatagcagccccgtcaaggcgggagtggagaccaccacaccctccaaacaaagcaacaacaagtacgcggccagcagctatctgagcctgacgcctgagcagtggaagtcccacagaagctacagctgccaggtcacgcatgaagggagcaccgtggagaagacagtggcccctacagaatgttca

SEQ ID NO: 2707 - DNA, 660 bp, synthetic construct
  misc_feature 1..660: note = Synthetic polynucleotide encoding artificial human antibody VL chain
  source 1..660: mol_type = other DNA
ctccctgtgctgactcagccaccttcctcctccgcatctcctggagaatccgccagactcacctgcaccttgcccagtgacatcaatgttactaactacaacatatactggtaccagcagaagccagggagccctcccaggtatctcctgtaccagtactcagactcagataagggccaggtctctggagtccccagccgcttctctggatccaaagatgcttcagccaatacagggattttactcatctccgggctccagtctgaggatgaggctgactattactgtatgatttggtcaagccttgtggtattcggcggagggaccaagctgaccgtcctaggtcagcccaaggctgccccctcggtcactctgttcccgccctcctctgaggagcttcaagccaacaaggccacactggtgtgtctcataagtgacttctacccgggagccgtgacagtggcctggaaggcagatagcagccccgtcaaggcgggagtggagaccaccacaccctccaaacaaagcaacaacaagtacgcggccagcagctatctgagcctgacgcctgagcagtggaagtcccacagaagctacagctgccaggtcacgcatgaagggagcaccgtggagaagacagtggcccctacagaatgttca

SEQ ID NO: 2708 - DNA, 659 bp, synthetic construct
  misc_feature 1..659: note = Synthetic polynucleotide encoding artificial human antibody VL chain
  source 1..659: mol_type = other DNA
gggatattgtgatgactcagtctccactctccctgcccgtcacccctggagagccggcctccatctcctgcaggtctagtcagagcctcctgcatagtgatggatacaactatttggattggttcctgcagaagccagggcagtctccacagctcctcatctatttgggttcttatcgggcctccggggtccctgacaggttcagtggcagtggctcaggcacagattttacactgaaaatcaccagagtggaggctgaggatgttggggtttattactgcatgcaagctctacaaactccgtggacgttcggccaagggaccaaggtggaaatcaaacgaactgtggctgcaccatctgtcttcatcttcccgccatctgatgagcagttgaaatctggaactgcctctgttgtgtgcctgctgaataacttctatcccagagaggccaaagtacagtggaaggtggataacgccctccaatcgggtaactcccaggagagtgtcacagagcaggacagcaaggacagcacctacagcctcagcagcaccctgacgctgagcaaagcagactacgagaaacacaaagtctacgcctgcgaagtcacccatcagggcctgagctcgcccgtcacaaagagcttcaacaggggagagtgt

SEQ ID NO: 2709 - DNA, 642 bp, synthetic construct
  misc_feature 1..642: note = Synthetic polynucleotide encoding artificial human antibody VL chain
  source 1..642: mol_type = other DNA
gtcatccaaatgacccagtctccatcctccctgtctgcatctgtaggagacagagtcaccatcgcttgccgggcaagtcagggcattagaaatgatttaggctggtatcagcagaaaccagggagagcccctaaactcctgatctatgctgcatccactttacaaagtggggtcccatcaaggttcagcggcagtggatctggcacagatttcactctcaccatctacagcctgcagcctgaagattttgcaacttattactgtctacaaaattacaattacccttggacgttcggccaagggaccaaggtggagatccaaggaactgtggctgcaccatctgtcttcatcttcccgccatctgatgagcagttgaaatctggaactgcctctgttgtgtgcctgctgaataacttctatcccagagaggccaaagtacagtggaaggtggataacgccctccaatcgggtaactcccaggagagtgtcacagagcaggacagcaaggacagcacctacagcctcagcagcaccctgacgctgagcaaagcagactacgagaaacacaaagtctacgcctgcgaagtcacccatcagggcctgagctcgcccgtcacaaagagcttcaacaggggagagtgt

SEQ ID NO: 2710 - DNA, 659 bp, synthetic construct
  misc_feature 1..659: note = Synthetic polynucleotide encoding artificial human antibody VL chain
  source 1..659: mol_type = other DNA
cggatattgtgatgacccagactccactctctctgtccgtcacccctggacagccggcctccatctcctgcaagtctagtcagagcctcctgcatagtgatggaaagacctatttgtattggtacctgcagaagccaggccagtctccacagctcctaatctatgaagtttccagccggttctctggagtgccagataggttcagtggcagcgggtcagggacagatttcacactgaaaatcagccgggtggaggctgaggatgttggggtttattactgcatgcaaggtatacaccttcctaggacttttggccaggggaccaagctggagatcaaacgaactgtggctgcaccatctgtcttcatcttcccgccatctgatgagcagttgaaatctggaactgcctctgttgtgtgcctgctgaataacttctatcccagagaggccaaagtacagtggaaggtggataacgccctccaatcgggtaactcccaggagagtgtcacagagcaggacagcaaggacagcacctacagcctcagcagcaccctgacgctgagcaaagcagactacgagaaacacaaagtctacgcctgcgaagtcacccatcagggcctgagctcgcccgtcacaaagagcttcaacaggggagagtgt

SEQ ID NO: 2711 - DNA, 24 bp, synthetic construct
  misc_feature 1..24: note = Synthetic polynucleotide encoding artificial human antibody CDR-H1 region
  source 1..24: mol_type = other DNA
gaagtgacgttcaacacttatggc

SEQ ID NO: 2712 - DNA, 24 bp, synthetic construct
  misc_feature 1..24: note = Synthetic polynucleotide encoding artificial human antibody CDR-H1 region
  source 1..24: mol_type = other DNA
ggattcacctttagtagctattgg

SEQ ID NO: 2713 - DNA, 24 bp, synthetic construct
  misc_feature 1..24: note = Synthetic polynucleotide encoding artificial human antibody CDR-H1 region
  source 1..24: mol_type = other DNA
ggattcacctttgaagattatgcc

SEQ ID NO: 2714 - DNA, 30 bp, synthetic construct
  misc_feature 1..30: note = Synthetic polynucleotide encoding artificial human antibody CDR-H1 region
  source 1..30: mol_type = other DNA
gggttctcactcagcactagtggagtgggt

SEQ ID NO: 2715 - DNA, 24 bp, synthetic construct
  misc_feature 1..24: note = Synthetic polynucleotide encoding artificial human antibody CDR-H1 region
  source 1..24: mol_type = other DNA
ggatataccttcaccacctactat

SEQ ID NO: 2716 - DNA, 24 bp, synthetic construct
  misc_feature 1..24: note = Synthetic polynucleotide encoding artificial human antibody CDR-H1 region
  source 1..24: mol_type = other DNA
ggattcgtctttgatgattatgcc

SEQ ID NO: 2717 - DNA, 24 bp, synthetic construct
  misc_feature 1..24: note = Synthetic polynucleotide encoding artificial human antibody CDR-H1 region
  source 1..24: mol_type = other DNA
ggttacacctttaccaactatggt

SEQ ID NO: 2718 - DNA, 24 bp, synthetic construct
  misc_feature 1..24: note = Synthetic polynucleotide encoding artificial human antibody CDR-H1 region
  source 1..24: mol_type = other DNA
ggattcacctttgatgattatgcc

SEQ ID NO: 2719 - DNA, 24 bp, synthetic construct
  misc_feature 1..24: note = Synthetic polynucleotide encoding artificial human antibody CDR-H1 region
  source 1..24: mol_type = other DNA
ggattcacttttagttactatggc

SEQ ID NO: 2720 - DNA, 24 bp, synthetic construct
  misc_feature 1..24: note = Synthetic polynucleotide encoding artificial human antibody CDR-H1 region
  source 1..24: mol_type = other DNA
ggattcccctttggtgattatgcc

SEQ ID NO: 2721 - DNA, 24 bp, synthetic construct
  misc_feature 1..24: note = Synthetic polynucleotide encoding artificial human antibody CDR-H1 region
  source 1..24: mol_type = other DNA
ggttacatcgatatcaacaacggc

SEQ ID NO: 2722 - DNA, 24 bp, synthetic construct
  misc_feature 1..24: note = Synthetic polynucleotide encoding artificial human antibody CDR-H1 region
  source 1..24: mol_type = other DNA
ggattcaccttcactcgccatggt

SEQ ID NO: 2723 - DNA, 24 bp, synthetic construct
  misc_feature 1..24: note = Synthetic polynucleotide encoding artificial human antibody CDR-H1 region
  source 1..24: mol_type = other DNA
cgattcacctttagcagctatgcc

SEQ ID NO: 2724 - DNA, 30 bp, synthetic construct
  misc_feature 1..30: note = Synthetic polynucleotide encoding artificial human antibody CDR-H1 region
  source 1..30: mol_type = other DNA
ggggacggtgtctctagcaacagtgctagt

SEQ ID NO: 2725 - DNA, 24 bp, synthetic construct
  misc_feature 1..24: note = Synthetic polynucleotide encoding artificial human antibody CDR-H1 region
  source 1..24: mol_type = other DNA
ggattcgccttcagtagtaatggc

SEQ ID NO: 2726 - DNA, 24 bp, synthetic construct
  misc_feature 1..24: note = Synthetic polynucleotide encoding artificial human antibody CDR-H1 region
  source 1..24: mol_type = other DNA
ggaatcaccttcagtagctatgac

SEQ ID NO: 2727 - DNA, 24 bp, synthetic construct
  misc_feature 1..24: note = Synthetic polynucleotide encoding artificial human antibody CDR-H1 region
  source 1..24: mol_type = other DNA
ggttacaactttaccaactatggt

SEQ ID NO: 2728 - DNA, 24 bp, synthetic construct
  misc_feature 1..24: note = Synthetic polynucleotide encoding artificial human antibody CDR-H1 region
  source 1..24: mol_type = other DNA
ggattcagcttcaggagttatgaa

SEQ ID NO: 2729 - DNA, 24 bp, synthetic construct
  misc_feature 1..24: note = Synthetic polynucleotide encoding artificial human antibody CDR-H1 region
  source 1..24: mol_type = other DNA
ggatacatcttcactagctatgct

SEQ ID NO: 2730 - DNA, 27 bp, synthetic construct
  misc_feature 1..27: note = Synthetic polynucleotide encoding artificial human antibody CDR-H1 region
  source 1..27: mol_type = other DNA
ggttacttaatcagtagtggctactac

SEQ ID NO: 2731 - DNA, 30 bp, synthetic construct
  misc_feature 1..30: note = Synthetic polynucleotide encoding artificial human antibody CDR-H1 region
  source 1..30: mol_type = other DNA
gggttctcactcaacactagtggagtgggt

SEQ ID NO: 2732 - DNA, 24 bp, synthetic construct
  misc_feature 1..24: note = Synthetic polynucleotide encoding artificial human antibody CDR-H1 region
  source 1..24: mol_type = other DNA
ggattcaccttcagcaactatagc

SEQ ID NO: 2733 - DNA, 24 bp, synthetic construct
  misc_feature 1..24: note = Synthetic polynucleotide encoding artificial human antibody CDR-H1 region
  source 1..24: mol_type = other DNA
ggattcaccttcagtagctatagc

SEQ ID NO: 2734 - DNA, 24 bp, synthetic construct
  misc_feature 1..24: note = Synthetic polynucleotide encoding artificial human antibody CDR-H1 region
  source 1..24: mol_type = other DNA
ggtgactccatgagtttttactat

SEQ ID NO: 2735 - DNA, 30 bp, synthetic construct
  misc_feature 1..30: note = Synthetic polynucleotide encoding artificial human antibody CDR-H1 region
  source 1..30: mol_type = other DNA
ggtggctccatcagcagtggtagttactac

SEQ ID NO: 2736 - DNA, 24 bp, synthetic construct
  misc_feature 1..24: note = Synthetic polynucleotide encoding artificial human antibody CDR-H1 region
  source 1..24: mol_type = other DNA
ggatttagtttcagtagttatagc

SEQ ID NO: 2737 - DNA, 30 bp, synthetic construct
  misc_feature 1..30: note = Synthetic polynucleotide encoding artificial human antibody CDR-H1 region
  source 1..30: mol_type = other DNA
ggtggctccatcagcagaagtccttacttc

SEQ ID NO: 2738 - DNA, 24 bp, synthetic construct
  misc_feature 1..24: note = Synthetic polynucleotide encoding artificial human antibody CDR-H1 region
  source 1..24: mol_type = other DNA
ggattcaccttcactagttatggc

SEQ ID NO: 2739 - DNA, 24 bp, synthetic construct
  misc_feature 1..24: note = Synthetic polynucleotide encoding artificial human antibody CDR-H1 region
  source 1..24: mol_type = other DNA
agtggctccagtggtagttattac

SEQ ID NO: 2740 - DNA, 24 bp, synthetic construct
  misc_feature 1..24: note = Synthetic polynucleotide encoding artificial human antibody CDR-H1 region
  source 1..24: mol_type = other DNA
ggatacaacttcagggactactat

SEQ ID NO: 2741 - DNA, 30 bp, synthetic construct
  misc_feature 1..30: note = Synthetic polynucleotide encoding artificial human antibody CDR-H1 region
  source 1..30: mol_type = other DNA
ggtggctccatcaacagtggtgattaccac

SEQ ID NO: 2742 - DNA, 30 bp, synthetic construct
  misc_feature 1..30: note = Synthetic polynucleotide encoding artificial human antibody CDR-H1 region
  source 1..30: mol_type = other DNA
ggtggctccatcagcagtagtggttactac

SEQ ID NO: 2743 - DNA, 24 bp, synthetic construct
  misc_feature 1..24: note = Synthetic polynucleotide encoding artificial human antibody CDR-H1 region
  source 1..24: mol_type = other DNA
ggattcaccttcagtagctatggc

SEQ ID NO: 2744 - DNA, 30 bp, synthetic construct
  misc_feature 1..30: note = Synthetic polynucleotide encoding artificial human antibody CDR-H1 region
  source 1..30: mol_type = other DNA
gggttctcactcaccactagtggagtgggt

SEQ ID NO: 2745 - DNA, 24 bp, synthetic construct
  misc_feature 1..24: note = Synthetic polynucleotide encoding artificial human antibody CDR-H1 region
  source 1..24: mol_type = other DNA
ggattcaccttcagtacatatgaa

SEQ ID NO: 2746 - DNA, 24 bp, synthetic construct
  misc_feature 1..24: note = Synthetic polynucleotide encoding artificial human antibody CDR-H1 region
  source 1..24: mol_type = other DNA
ggaggcaccttcagcagctatgct

SEQ ID NO: 2747 - DNA, 30 bp, synthetic construct
  misc_feature 1..30: note = Synthetic polynucleotide encoding artificial human antibody CDR-H1 region
  source 1..30: mol_type = other DNA
ggtggctccatcagcagtgataattactac

SEQ ID NO: 2748 - DNA, 24 bp, synthetic construct
  misc_feature 1..24: note = Synthetic polynucleotide encoding artificial human antibody CDR-H1 region
  source 1..24: mol_type = other DNA
ggtgcctccatcagtagttactac

SEQ ID NO: 2749 - DNA, 24 bp, synthetic construct
  misc_feature 1..24: note = Synthetic polynucleotide encoding artificial human antibody CDR-H1 region
  source 1..24: mol_type = other DNA
ggaaacaccttcactacctatact

SEQ ID NO: 2750 - DNA, 24 bp, synthetic construct
  misc_feature 1..24: note = Synthetic polynucleotide encoding artificial human antibody CDR-H1 region
  source 1..24: mol_type = other DNA
ggattcacctttagcagctatgcc

SEQ ID NO: 2751 - DNA, 24 bp, synthetic construct
  misc_feature 1..24: note = Synthetic polynucleotide encoding artificial human antibody CDR-H1 region
  source 1..24: mol_type = other DNA
ggattcacctttgatgattatggc

SEQ ID NO: 2752 - DNA, 24 bp, synthetic construct
  misc_feature 1..24: note = Synthetic polynucleotide encoding artificial human antibody CDR-H1 region
  source 1..24: mol_type = other DNA
ggattcaccttcagtagctatggc

SEQ ID NO: 2753 - DNA, 30 bp, synthetic construct
  misc_feature 1..30: note = Synthetic polynucleotide encoding artificial human antibody CDR-H1 region
  source 1..30: mol_type = other DNA
ggtggctccatcagcagtggtggttactac

SEQ ID NO: 2754 - DNA, 24 bp, synthetic construct
  misc_feature 1..24: note = Synthetic polynucleotide encoding artificial human antibody CDR-H1 region
  source 1..24: mol_type = other DNA
ggatacaccttcaccggctactat

SEQ ID NO: 2755 - DNA, 24 bp, synthetic construct
  misc_feature 1..24: note = Synthetic polynucleotide encoding artificial human antibody CDR-H1 region
  source 1..24: mol_type = other DNA
ggattcaccttcagtagctacgac

SEQ ID NO: 2756 - DNA, 24 bp, synthetic construct
  misc_feature 1..24: note = Synthetic polynucleotide encoding artificial human antibody CDR-H1 region
  source 1..24: mol_type = other DNA
ggattcaccttcaggagttatggc

SEQ ID NO: 2757 - DNA, 24 bp, synthetic construct
  misc_feature 1..24: note = Synthetic polynucleotide encoding artificial human antibody CDR-H1 region
  source 1..24: mol_type = other DNA
ggattcaccttcagtgactactac

SEQ ID NO: 2758 - DNA, 24 bp, synthetic construct
  misc_feature 1..24: note = Synthetic polynucleotide encoding artificial human antibody CDR-H1 region
  source 1..24: mol_type = other DNA
ggattcaccttcagtagttatcac

SEQ ID NO: 2759 - DNA, 24 bp, synthetic construct
  misc_feature 1..24: note = Synthetic polynucleotide encoding artificial human antibody CDR-H1 region
  source 1..24: mol_type = other DNA
ggattcaccttcagtagctatgct

SEQ ID NO: 2760 - DNA, 24 bp, synthetic construct
  misc_feature 1..24: note = Synthetic polynucleotide encoding artificial human antibody CDR-H1 region
  source 1..24: mol_type = other DNA
ggattcacccttgaagagtttgcc

SEQ ID NO: 2761 - DNA, 24 bp, synthetic construct
  misc_feature 1..24: note = Synthetic polynucleotide encoding artificial human antibody CDR-H1 region
  source 1..24: mol_type = other DNA
ggtggctccatcagtgattactac

SEQ ID NO: 2762 - DNA, 24 bp, synthetic construct
  misc_feature 1..24: note = Synthetic polynucleotide encoding artificial human antibody CDR-H1 region
  source 1..24: mol_type = other DNA
ggaggcaccttcagcagctatgct

SEQ ID NO: 2763 - DNA, 24 bp, synthetic construct
  misc_feature 1..24: note = Synthetic polynucleotide encoding artificial human antibody CDR-H1 region
  source 1..24: mol_type = other DNA
ggttacacctttagcagctacggt

SEQ ID NO: 2764 - DNA, 24 bp, synthetic construct
  misc_feature 1..24: note = Synthetic polynucleotide encoding artificial human antibody CDR-H1 region
  source 1..24: mol_type = other DNA
ggattcaccttccggagttatgaa

SEQ ID NO: 2765 - DNA, 24 bp, synthetic construct
  misc_feature 1..24: note = Synthetic polynucleotide encoding artificial human antibody CDR-H1 region
  source 1..24: mol_type = other DNA
ggaggcaccttcagcagctatgct

SEQ ID NO: 2766 - DNA, 24 bp, synthetic construct
  misc_feature 1..24: note = Synthetic polynucleotide encoding artificial human antibody CDR-H1 region
  source 1..24: mol_type = other DNA
ggagacagcttcaacaagtacttt

SEQ ID NO: 2767 - DNA, 24 bp, synthetic construct
  misc_feature 1..24: note = Synthetic polynucleotide encoding artificial human antibody CDR-H1 region
  source 1..24: mol_type = other DNA
ggtttcacattcagtacctatggc

SEQ ID NO: 2768 - DNA, 24 bp, synthetic construct
  misc_feature 1..24: note = Synthetic polynucleotide encoding artificial human antibody CDR-H1 region
  source 1..24: mol_type = other DNA
ggattcgcctttagcagctatgcc

SEQ ID NO: 2769 - DNA, 24 bp, synthetic construct
  misc_feature 1..24: note = Synthetic polynucleotide encoding artificial human antibody CDR-H1 region
  source 1..24: mol_type = other DNA
ggattcaccttcagtaatcatgct

SEQ ID NO: 2770 - DNA, 24 bp, synthetic construct
  misc_feature 1..24: note = Synthetic polynucleotide encoding artificial human antibody CDR-H1 region
  source 1..24: mol_type = other DNA
ggattcaccttcagtagtcatggc

SEQ ID NO: 2771 - DNA, 30 bp, synthetic construct
  misc_feature 1..30: note = Synthetic polynucleotide encoding artificial human antibody CDR-H1 region
  source 1..30: mol_type = other DNA
ggtggctccgtcgacaatgttgattcctac

SEQ ID NO: 2772 - DNA, 24 bp, synthetic construct
  misc_feature 1..24: note = Synthetic polynucleotide encoding artificial human antibody CDR-H1 region
  source 1..24: mol_type = other DNA
ggatacagctttaccacctactgg

SEQ ID NO: 2773 - DNA, 30 bp, synthetic construct
  misc_feature 1..30: note = Synthetic polynucleotide encoding artificial human antibody CDR-H1 region
  source 1..30: mol_type = other DNA
ggtgactccatcagcagtgggagttactat

SEQ ID NO: 2774 - DNA, 30 bp, synthetic construct
  misc_feature 1..30: note = Synthetic polynucleotide encoding artificial human antibody CDR-H1 region
  source 1..30: mol_type = other DNA
ggggacagtgtctctagcaacagtgctgct

SEQ ID NO: 2775 - DNA, 24 bp, synthetic construct
  misc_feature 1..24: note = Synthetic polynucleotide encoding artificial human antibody CDR-H1 region
  source 1..24: mol_type = other DNA
ggatacaccctcagtgaattatcc

SEQ ID NO: 2776 - DNA, 24 bp, synthetic construct
  misc_feature 1..24: note = Synthetic polynucleotide encoding artificial human antibody CDR-H1 region
  source 1..24: mol_type = other DNA
ggattcaccttcagtagctatagc

SEQ ID NO: 2777 - DNA, 24 bp, synthetic construct
  misc_feature 1..24: note = Synthetic polynucleotide encoding artificial human antibody CDR-H1 region
  source 1..24: mol_type = other DNA
ggattcacctttagcaactatgcc

SEQ ID NO: 2778 - DNA, 24 bp, synthetic construct
  misc_feature 1..24: note = Synthetic polynucleotide encoding artificial human antibody CDR-H1 region
  source 1..24: mol_type = other DNA
ggaggccccttcagcagctatact

SEQ ID NO: 2779 - DNA, 30 bp, synthetic construct
  misc_feature 1..30: note = Synthetic polynucleotide encoding artificial human antibody CDR-H1 region
  source 1..30: mol_type = other DNA
ggtggctccgtcaacactggtacttcctac

SEQ ID NO: 2780 - DNA, 24 bp, synthetic construct
  misc_feature 1..24: note = Synthetic polynucleotide encoding artificial human antibody CDR-H1 region
  source 1..24: mol_type = other DNA
ggattccatttcggcagtcacggc

SEQ ID NO: 2781 - DNA, 30 bp, synthetic construct
  misc_feature 1..30: note = Synthetic polynucleotide encoding artificial human antibody CDR-H1 region
  source 1..30: mol_type = other DNA
ggtggctccatcaccactggtagttattac

SEQ ID NO: 2782 - DNA, 24 bp, synthetic construct
  misc_feature 1..24: note = Synthetic polynucleotide encoding artificial human antibody CDR-H1 region
  source 1..24: mol_type = other DNA
ggattcacctttgatgattatgcc

SEQ ID NO: 2783 - DNA, 24 bp, synthetic construct
  misc_feature 1..24: note = Synthetic polynucleotide encoding artificial human antibody CDR-H1 region
  source 1..24: mol_type = other DNA
ggtgcctccatgaataattactac

SEQ ID NO: 2784 - DNA, 30 bp, synthetic construct
  misc_feature 1..30: note = Synthetic polynucleotide encoding artificial human antibody CDR-H1 region
  source 1..30: mol_type = other DNA
gggttctcactcaccactactgacgtgggt

SEQ ID NO: 2785 - DNA, 24 bp, synthetic construct
  misc_feature 1..24: note = Synthetic polynucleotide encoding artificial human antibody CDR-H1 region
  source 1..24: mol_type = other DNA
ggattcaccttcagtagctattcc

SEQ ID NO: 2786 - DNA, 24 bp, synthetic construct
  misc_feature 1..24: note = Synthetic polynucleotide encoding artificial human antibody CDR-H1 region
  source 1..24: mol_type = other DNA
ggatacaactttatcagccactgg

SEQ ID NO: 2787 - DNA, 24 bp, synthetic construct
  misc_feature 1..24: note = Synthetic polynucleotide encoding artificial human antibody CDR-H1 region
  source 1..24: mol_type = other DNA
ggatacagctttaccagcttctgg

SEQ ID NO: 2788 - DNA, 24 bp, synthetic construct
  misc_feature 1..24: note = Synthetic polynucleotide encoding artificial human antibody CDR-H1 region
  source 1..24: mol_type = other DNA
ggtggctccatcgatagttattac

SEQ ID NO: 2789 - DNA, 24 bp, synthetic construct
  misc_feature 1..24: note = Synthetic polynucleotide encoding artificial human antibody CDR-H1 region
  source 1..24: mol_type = other DNA
ggaggcatcttcagttactttgct

SEQ ID NO: 2790 - DNA, 24 bp, synthetic construct
  misc_feature 1..24: note = Synthetic polynucleotide encoding artificial human antibody CDR-H1 region
  source 1..24: mol_type = other DNA
gaattcagctttcaatatttttcc

SEQ ID NO: 2791 - DNA, 27 bp, synthetic construct
  misc_feature 1..27: note = Synthetic polynucleotide encoding artificial human antibody CDR-H1 region
  source 1..27: mol_type = other DNA
ggttacacccttaacaatgatgtcgct

SEQ ID NO: 2792 - DNA, 24 bp, synthetic construct
  misc_feature 1..24: note = Synthetic polynucleotide encoding artificial human antibody CDR-H1 region
  source 1..24: mol_type = other DNA
ggattcaggtttaattactattgg

SEQ ID NO: 2793 - DNA, 30 bp, synthetic construct
  misc_feature 1..30: note = Synthetic polynucleotide encoding artificial human antibody CDR-H1 region
  source 1..30: mol_type = other DNA
ggtggctccatcagtggtgataaaaacttc

SEQ ID NO: 2794 - DNA, 24 bp, synthetic construct
  misc_feature 1..24: note = Synthetic polynucleotide encoding artificial human antibody CDR-H1 region
  source 1..24: mol_type = other DNA
ggattcacattcagtgattatgaa

SEQ ID NO: 2795 - DNA, 24 bp, synthetic construct
  misc_feature 1..24: note = Synthetic polynucleotide encoding artificial human antibody CDR-H1 region
  source 1..24: mol_type = other DNA
ggattcccccctaggagttttgcc

SEQ ID NO: 2796 - DNA, 24 bp, synthetic construct
  misc_feature 1..24: note = Synthetic polynucleotide encoding artificial human antibody CDR-H1 region
  source 1..24: mol_type = other DNA
ggattcaccttcagcaactatggg

SEQ ID NO: 2797 - DNA, 24 bp, synthetic construct
  misc_feature 1..24: note = Synthetic polynucleotide encoding artificial human antibody CDR-H1 region
  source 1..24: mol_type = other DNA
ggattcacctttgatgattatacc

SEQ ID NO: 2798 - DNA, 24 bp, synthetic construct
  misc_feature 1..24: note = Synthetic polynucleotide encoding artificial human antibody CDR-H1 region
  source 1..24: mol_type = other DNA
ggtgacacctttcccaactatgtt

SEQ ID NO: 2799 - DNA, 24 bp, synthetic construct
  misc_feature 1..24: note = Synthetic polynucleotide encoding artificial human antibody CDR-H1 region
  source 1..24: mol_type = other DNA
ggattcacatttgatgattatgcc

SEQ ID NO: 2800 - DNA, 24 bp, synthetic construct
  misc_feature 1..24: note = Synthetic polynucleotide encoding artificial human antibody CDR-H1 region
  source 1..24: mol_type = other DNA
ggattcacctttagcagctatgcc

SEQ ID NO: 2801 - DNA, 24 bp, synthetic construct
  misc_feature 1..24: note = Synthetic polynucleotide encoding artificial human antibody CDR-H1 region
  source 1..24: mol_type = other DNA
ggattcaccttcagtaactatgac

SEQ ID NO: 2802 - DNA, 24 bp, synthetic construct
  misc_feature 1..24: note = Synthetic polynucleotide encoding artificial human antibody CDR-H1 region
  source 1..24: mol_type = other DNA
ggattcaccttcagtccctatagt

SEQ ID NO: 2803 - DNA, 30 bp, synthetic construct
  misc_feature 1..30: note = Synthetic polynucleotide encoding artificial human antibody CDR-H1 region
  source 1..30: mol_type = other DNA
ggtggctccatcaccagtggtagttacttc

SEQ ID NO: 2804 - DNA, 30 bp, synthetic construct
  misc_feature 1..30: note = Synthetic polynucleotide encoding artificial human antibody CDR-H1 region
  source 1..30: mol_type = other DNA
ggtggctccgtcagcagtagtagttactac

SEQ ID NO: 2805 - DNA, 24 bp, synthetic construct
  misc_feature 1..24: note = Synthetic polynucleotide encoding artificial human antibody CDR-H1 region
  source 1..24: mol_type = other DNA
ggattcaccttcagtaactatgac

SEQ ID NO: 2806 - DNA, 24 bp, synthetic construct
  misc_feature 1..24: note = Synthetic polynucleotide encoding artificial human antibody CDR-H1 region
  source 1..24: mol_type = other DNA
ggctacgcctttatcggtaactgg

SEQ ID NO: 2807 - DNA, 30 bp, synthetic construct
  misc_feature 1..30: note = Synthetic polynucleotide encoding artificial human antibody CDR-H1 region
  source 1..30: mol_type = other DNA
ggattcaccttttcctttagcagttatgcc

SEQ ID NO: 2808 - DNA, 24 bp, synthetic construct
  misc_feature 1..24: note = Synthetic polynucleotide encoding artificial human antibody CDR-H1 region
  source 1..24: mol_type = other DNA
ggattcaccttcaataattatgaa

SEQ ID NO: 2809 - DNA, 24 bp, synthetic construct
  misc_feature 1..24: note = Synthetic polynucleotide encoding artificial human antibody CDR-H1 region
  source 1..24: mol_type = other DNA
ggattcacctttagtagcaattgg

SEQ ID NO: 2810 - DNA, 30 bp, synthetic construct; identical to SEQ ID NO: 2753
  misc_feature 1..30: note = Synthetic polynucleotide encoding artificial human antibody CDR-H1 region
  source 1..30: mol_type = other DNA

SEQ ID NO: 2811 - DNA, 24 bp, synthetic construct
  misc_feature 1..24: note = Synthetic polynucleotide encoding artificial human antibody CDR-H1 region
  source 1..24: mol_type = other DNA
ggattcacgttcagtagctatggc

SEQ ID NO: 2812 - DNA, 24 bp, synthetic construct
  misc_feature 1..24: note = Synthetic polynucleotide encoding artificial human antibody CDR-H1 region
  source 1..24: mol_type = other DNA
ggattcaccttcagtgactactac

SEQ ID NO: 2813 - DNA, 30 bp, synthetic construct
  misc_feature 1..30: note = Synthetic polynucleotide encoding artificial human antibody CDR-H1 region
  source 1..30: mol_type = other DNA
ggtggctccatcagcagtggtggttacccc

SEQ ID NO: 2814 - DNA, 24 bp, synthetic construct
  misc_feature 1..24: note = Synthetic polynucleotide encoding artificial human antibody CDR-H1 region
  source 1..24: mol_type = other DNA
ggtggctccatcagtatttactac

SEQ ID NO: 2815 - DNA, 24 bp, synthetic construct
  misc_feature 1..24: note = Synthetic polynucleotide encoding artificial human antibody CDR-H1 region
  source 1..24: mol_type = other DNA
aatagctccatcagtagttactac

SEQ ID NO: 2816 - DNA, 24 bp, synthetic construct
  misc_feature 1..24: note = Synthetic polynucleotide encoding artificial human antibody CDR-H1 region
  source 1..24: mol_type = other DNA
ggattcacctttaatagctattgg

SEQ ID NO: 2817 - DNA, 24 bp, synthetic construct
  misc_feature 1..24: note = Synthetic polynucleotide encoding artificial human antibody CDR-H1 region
  source 1..24: mol_type = other DNA
ggattcacctttgatgattatgcc

SEQ ID NO: 2818 - DNA, 24 bp, synthetic construct
  misc_feature 1..24: note = Synthetic polynucleotide encoding artificial human antibody CDR-H1 region
  source 1..24: mol_type = other DNA
ggttacaggtttaacgcctactgg

SEQ ID NO: 2819 - DNA, 30 bp, synthetic construct
  misc_feature 1..30: note = Synthetic polynucleotide encoding artificial human antibody CDR-H1 region
  source 1..30: mol_type = other DNA
ggggacagtgtctctagtaccagtggtgct

SEQ ID NO: 2820 - DNA, 30 bp, synthetic construct; identical to SEQ ID NO: 2774
  misc_feature 1..30: note = Synthetic polynucleotide encoding artificial human antibody CDR-H1 region
  source 1..30: mol_type = other DNA

SEQ ID NO: 2821 - DNA, 24 bp, synthetic construct
  misc_feature 1..24: note = Synthetic polynucleotide encoding artificial human antibody CDR-H1 region
  source 1..24: mol_type = other DNA
ggtggctccatcagtagttactac

SEQ ID NO: 2822 - DNA, 24 bp, synthetic construct
  misc_feature 1..24: note = Synthetic polynucleotide encoding artificial human antibody CDR-H1 region
  source 1..24: mol_type = other DNA
ggatacagctttaccagctactgg

SEQ ID NO: 2823 - DNA, 24 bp, synthetic construct
  misc_feature 1..24: note = Synthetic polynucleotide encoding artificial human antibody CDR-H1 region
  source 1..24: mol_type = other DNA
ggattcaccttcagtagctatggc

SEQ ID NO: 2824 - DNA, 24 bp, synthetic construct
  misc_feature 1..24: note = Synthetic polynucleotide encoding artificial human antibody CDR-H1 region
  source 1..24: mol_type = other DNA
gggttcactttcagatcctacagc

SEQ ID NO: 2825 - DNA, 24 bp, synthetic construct
  misc_feature 1..24: note = Synthetic polynucleotide encoding artificial human antibody CDR-H1 region
  source 1..24: mol_type = other DNA
ggaggcaccttcagcagttatact

SEQ ID NO: 2826 - DNA, 24 bp, synthetic construct
  misc_feature 1..24: note = Synthetic polynucleotide encoding artificial human antibody CDR-H1 region
  source 1..24: mol_type = other DNA
ggattcagcttcagcagatataat

SEQ ID NO: 2827 - DNA, 24 bp, synthetic construct
  misc_feature 1..24: note = Synthetic polynucleotide encoding artificial human antibody CDR-H1 region
  source 1..24: mol_type = other DNA
ggattcaccttcactaattatgcc

SEQ ID NO: 2828 - DNA, 24 bp, synthetic construct
  misc_feature 1..24: note = Synthetic polynucleotide encoding artificial human antibody CDR-H1 region
  source 1..24: mol_type = other DNA
ggattctccttcagtagttttggc

SEQ ID NO: 2829 - DNA, 24 bp, synthetic construct
  misc_feature 1..24: note = Synthetic polynucleotide encoding artificial human antibody CDR-H1 region
  source 1..24: mol_type = other DNA
ggattcacatttagctcgtatgcc

SEQ ID NO: 2830 - DNA, 24 bp, synthetic construct
  misc_feature 1..24: note = Synthetic polynucleotide encoding artificial human antibody CDR-H1 region
  source 1..24: mol_type = other DNA
ggattcaccttcagtagtcatggc

SEQ ID NO: 2831 - DNA, 24 bp, synthetic construct
  misc_feature 1..24: note = Synthetic polynucleotide encoding artificial human antibody CDR-H1 region
  source 1..24: mol_type = other DNA
ggattcagctttagtacctattgg

SEQ ID NO: 2832 - DNA, 24 bp, synthetic construct
  misc_feature 1..24: note = Synthetic polynucleotide encoding artificial human antibody CDR-H1 region
  source 1..24: mol_type = other DNA
ggattcaccttcaataactactgg

SEQ ID NO: 2833 - DNA, 24 bp, synthetic construct
  misc_feature 1..24: note = Synthetic polynucleotide encoding artificial human antibody CDR-H1 region
  source 1..24: mol_type = other DNA
ggatttactttcagtcacggctgg

SEQ ID NO: 2834 - DNA, 24 bp, synthetic construct
  misc_feature 1..24: note = Synthetic polynucleotide encoding artificial human antibody CDR-H1 region
  source 1..24: mol_type = other DNA
ggtggctccatcagaaatgactac

SEQ ID NO: 2835 - DNA, 24 bp, synthetic construct
  misc_feature 1..24: note = Synthetic polynucleotide encoding artificial human antibody CDR-H1 region
  source 1..24: mol_type = other DNA
ggaggcaccttcagcagctatgct

SEQ ID NO: 2836 - DNA, 30 bp, synthetic construct
  misc_feature 1..30: note = Synthetic polynucleotide encoding artificial human antibody CDR-H1 region
  source 1..30: mol_type = other DNA
ggtggctccatcagcagtagtaattacttc

SEQ ID NO: 2837 - DNA, 24 bp, synthetic construct
  misc_feature 1..24: note = Synthetic polynucleotide encoding artificial human antibody CDR-H1 region
  source 1..24: mol_type = other DNA
ggatttaccttcagtgactactgg

SEQ ID NO: 2838 - DNA, 30 bp, synthetic construct
  misc_feature 1..30: note = Synthetic polynucleotide encoding artificial human antibody CDR-H1 region
  source 1..30: mol_type = other DNA
gatgtctccatcatcagtagtttctattac

SEQ ID NO: 2839 - DNA, 30 bp, synthetic construct
  misc_feature 1..30: note = Synthetic polynucleotide encoding artificial human antibody CDR-H1 region
  source 1..30: mol_type = other DNA
ggtgcctccgtttccagtggttcttactac

SEQ ID NO: 2840 - DNA, 24 bp, synthetic construct
  misc_feature 1..24: note = Synthetic polynucleotide encoding artificial human antibody CDR-H1 region
  source 1..24: mol_type = other DNA
ggaggcaccttcagcggctatggc

SEQ ID NO: 2841 - DNA, 24 bp, synthetic construct
  misc_feature 1..24: note = Synthetic polynucleotide encoding artificial human antibody CDR-H1 region
  source 1..24: mol_type = other DNA
ggattcaccttcagtagctactgg

SEQ ID NO: 2842 - DNA, 30 bp, synthetic construct
  misc_feature 1..30: note = Synthetic polynucleotide encoding artificial human antibody CDR-H1 region
  source 1..30: mol_type = other DNA
ggtggctccatcagcagtggagattactac

SEQ ID NO: 2843 - DNA, 24 bp, synthetic construct
  misc_feature 1..24: note = Synthetic polynucleotide encoding artificial human antibody CDR-H1 region
  source 1..24: mol_type = other DNA
ggattcacctttagcagctatgcc

SEQ ID NO: 2844 - DNA, 24 bp, synthetic construct
  misc_feature 1..24: note = Synthetic polynucleotide encoding artificial human antibody CDR-H1 region
  source 1..24: mol_type = other DNA
ggattcacctttagcagctatgcc

SEQ ID NO: 2845 - DNA, 24 bp, synthetic construct
  misc_feature 1..24: note = Synthetic polynucleotide encoding artificial human antibody CDR-H1 region
  source 1..24: mol_type = other DNA
ggattcaccttgagcagctatgct

SEQ ID NO: 2846 - DNA, 30 bp, synthetic construct
  misc_feature 1..30: note = Synthetic polynucleotide encoding artificial human antibody CDR-H1 region
  source 1..30: mol_type = other DNA
ggtggctccatcagcagtggtggttactcc

SEQ ID NO: 2847 - DNA, 24 bp, synthetic construct
  misc_feature 1..24: note = Synthetic polynucleotide encoding artificial human antibody CDR-H1 region
  source 1..24: mol_type = other DNA
ggattcaccttcagtaactctgct

SEQ ID NO: 2848 - DNA, 24 bp, synthetic construct
  misc_feature 1..24: note = Synthetic polynucleotide encoding artificial human antibody CDR-H1 region
  source 1..24: mol_type = other DNA
ggatacaccttcaccagtcactat

SEQ ID NO: 2849 - DNA, 24 bp, synthetic construct
  misc_feature 1..24: note = Synthetic polynucleotide encoding artificial human antibody CDR-H1 region
  source 1..24: mol_type = other DNA
ggattcaccttcagcgcctactgg

SEQ ID NO: 2850 - DNA, 24 bp, synthetic construct
  misc_feature 1..24: note = Synthetic polynucleotide encoding artificial human antibody CDR-H1 region
  source 1..24: mol_type = other DNA
ggatactccctcactgaaatctcc

SEQ ID NO: 2851 - DNA, 30 bp, synthetic construct
  misc_feature 1..30: note = Synthetic polynucleotide encoding artificial human antibody CDR-H1 region
  source 1..30: mol_type = other DNA
ggtggctccatcaggagcagtgctcccttc

SEQ ID NO: 2852 - DNA, 24 bp, synthetic construct
  misc_feature 1..24: note = Synthetic polynucleotide encoding artificial human antibody CDR-H1 region
  source 1..24: mol_type = other DNA
ggttacatctttaccacctatgtt

SEQ ID NO: 2853 - DNA, 24 bp, synthetic construct
  misc_feature 1..24: note = Synthetic polynucleotide encoding artificial human antibody CDR-H1 region
  source 1..24: mol_type = other DNA
ggattcacgtttgatgattatgcc

SEQ ID NO: 2854 - DNA, 24 bp, synthetic construct
  misc_feature 1..24: note = Synthetic polynucleotide encoding artificial human antibody CDR-H1 region
  source 1..24: mol_type = other DNA
ggattcaccttcaataattactgg

SEQ ID NO: 2855 - DNA, 24 bp, synthetic construct
  misc_feature 1..24: note = Synthetic polynucleotide encoding artificial human antibody CDR-H1 region
  source 1..24: mol_type = other DNA
ggtgactccgtcagtagtttctac

SEQ ID NO: 2856 - DNA, 24 bp, synthetic construct
  misc_feature 1..24: note = Synthetic polynucleotide encoding artificial human antibody CDR-H1 region
  source 1..24: mol_type = other DNA
ggatataattttaatgatgatcgg

SEQ ID NO: 2857 - DNA, 24 bp, synthetic construct
  misc_feature 1..24: note = Synthetic polynucleotide encoding artificial human antibody CDR-H1 region
  source 1..24: mol_type = other DNA
ggattcaccgtcagtaccaactac

SEQ ID NO: 2858 - DNA, 24 bp, synthetic construct
  misc_feature 1..24: note = Synthetic polynucleotide encoding artificial human antibody CDR-H1 region
  source 1..24: mol_type = other DNA
ggattcacgttcagtgaccactac

SEQ ID NO: 2859 - DNA, 24 bp, synthetic construct
  misc_feature 1..24: note = Synthetic polynucleotide encoding artificial human antibody CDR-H1 region
  source 1..24: mol_type = other DNA
ggattcaccttccgtgattatggc

SEQ ID NO: 2860 - DNA, 24 bp, synthetic construct
  misc_feature 1..24: note = Synthetic polynucleotide encoding artificial human antibody CDR-H1 region
  source 1..24: mol_type = other DNA
ggattcgacatcaggagttatacc

SEQ ID NO: 2861 - DNA, 24 bp, synthetic construct
  misc_feature 1..24: note = Synthetic polynucleotide encoding artificial human antibody CDR-H1 region
  source 1..24: mol_type = other DNA
ggatacaccttcaccgactactat

SEQ ID NO: 2862 - DNA, 24 bp, synthetic construct
  misc_feature 1..24: note = Synthetic polynucleotide encoding artificial human antibody CDR-H1 region
  source 1..24: mol_type = other DNA
ggattcacctttagcaactatgcc

SEQ ID NO: 2863 - DNA, 24 bp, synthetic construct
  misc_feature 1..24: note = Synthetic polynucleotide encoding artificial human antibody CDR-H1 region
  source 1..24: mol_type = other DNA
ggattcaacttcaattcttataca

SEQ ID NO: 2864 - DNA, 24 bp, synthetic construct
  misc_feature 1..24: note = Synthetic polynucleotide encoding artificial human antibody CDR-H1 region
  source 1..24: mol_type = other DNA
ggattcacatttgatgattatgcc

SEQ ID NO: 2865 - DNA, 24 bp, synthetic construct
  misc_feature 1..24: note = Synthetic polynucleotide encoding artificial human antibody CDR-H1 region
  source 1..24: mol_type = other DNA
ggaggcaccttcagcagctatggt

SEQ ID NO: 2866 - DNA, 24 bp, synthetic construct
  misc_feature 1..24: note = Synthetic polynucleotide encoding artificial human antibody CDR-H1 region
  source 1..24: mol_type = other DNA
ggattaacctttaacagatttgcc

SEQ ID NO: 2867 - DNA, 27 bp, synthetic construct
  misc_feature 1..27: note = Synthetic polynucleotide encoding artificial human antibody CDR-H1 region
  source 1..27: mol_type = other DNA
ggctactccattagcactgcttactac

SEQ ID NO: 2868 - DNA, 24 bp, synthetic construct
  misc_feature 1..24: note = Synthetic polynucleotide encoding artificial human antibody CDR-H1 region
  source 1..24: mol_type = other DNA
ggaggcaacgtcagaagttatagc

SEQ ID NO: 2869 - DNA, 24 bp, synthetic construct
  misc_feature 1..24: note = Synthetic polynucleotide encoding artificial human antibody CDR-H1 region
  source 1..24: mol_type = other DNA
ggtgactccatcagtagtaactac

SEQ ID NO: 2870 - DNA, 24 bp, synthetic construct
  misc_feature 1..24: note = Synthetic polynucleotide encoding artificial human antibody CDR-H1 region
  source 1..24: mol_type = other DNA
ggttacaggttttccaactttggg

SEQ ID NO: 2871 - DNA, 24 bp, synthetic construct
  misc_feature 1..24: note = Synthetic polynucleotide encoding artificial human antibody CDR-H1 region
  source 1..24: mol_type = other DNA
ggatacacgttcactaattatgct

SEQ ID NO: 2872 - DNA, 30 bp, synthetic construct
  misc_feature 1..30: note = Synthetic polynucleotide encoding artificial human antibody CDR-H1 region
  source 1..30: mol_type = other DNA
ggtgactccatcagcagcagtagctacttc

SEQ ID NO: 2873 - DNA, 24 bp, synthetic construct
  misc_feature 1..24: note = Synthetic polynucleotide encoding artificial human antibody CDR-H1 region
  source 1..24: mol_type = other DNA
ggattcaccttcagtaactatggc

SEQ ID NO: 2874 - DNA, 24 bp, synthetic construct
  misc_feature 1..24: note = Synthetic polynucleotide encoding artificial human antibody CDR-H1 region
  source 1..24: mol_type = other DNA
ggaggctccttcaacacctatgca

SEQ ID NO: 2875 - DNA, 24 bp, synthetic construct
  misc_feature 1..24: note = Synthetic polynucleotide encoding artificial human antibody CDR-H1 region
  source 1..24: mol_type = other DNA
ggagacaccttcacctcttttgcc

SEQ ID NO: 2876 - DNA, 30 bp, synthetic construct
  misc_feature 1..30: note = Synthetic polynucleotide encoding artificial human antibody CDR-H1 region
  source 1..30: mol_type = other DNA
ggtgactccatcagtaacggtgattattgc

SEQ ID NO: 2877 - DNA, 24 bp, synthetic construct
  misc_feature 1..24: note = Synthetic polynucleotide encoding artificial human antibody CDR-H1 region
  source 1..24: mol_type = other DNA
ggattcacctttagaagctattgg

SEQ ID NO: 2878 - DNA, 24 bp, synthetic construct
  misc_feature 1..24: note = Synthetic polynucleotide encoding artificial human antibody CDR-H1 region
  source 1..24: mol_type = other DNA
ggattcacctacgacagttatgtc

SEQ ID NO: 2879 - DNA, 30 bp, synthetic construct
  misc_feature 1..30: note = Synthetic polynucleotide encoding artificial human antibody CDR-H1 region
  source 1..30: mol_type = other DNA
agtggctccgtcagcagtggtagtcactac

SEQ ID NO: 2880 - DNA, 24 bp, synthetic construct
  misc_feature 1..24: note = Synthetic polynucleotide encoding artificial human antibody CDR-H1 region
  source 1..24: mol_type = other DNA
ggatacagcttcaccggctattat

SEQ ID NO: 2881 - DNA, 24 bp, synthetic construct
  misc_feature 1..24: note = Synthetic polynucleotide encoding artificial human antibody CDR-H1 region
  source 1..24: mol_type = other DNA
ggattcaccttcagtaactatggc

SEQ ID NO: 2882 - DNA, 24 bp, synthetic construct
  misc_feature 1..24: note = Synthetic polynucleotide encoding artificial human antibody CDR-H1 region
  source 1..24: mol_type = other DNA
ggattcaccttcagtaactataac

SEQ ID NO: 2883 - DNA, 30 bp, synthetic construct
  misc_feature 1..30: note = Synthetic polynucleotide encoding artificial human antibody CDR-H1 region
  source 1..30: mol_type = other DNA
ggtggctccatcagcagtagtagttactac

SEQ ID NO: 2884 - DNA, 24 bp, synthetic construct
  misc_feature 1..24: note = Synthetic polynucleotide encoding artificial human antibody CDR-H1 region
  source 1..24: mol_type = other DNA
ggtttcactttcagtaacgcctgg

SEQ ID NO: 2885 - DNA, 24 bp, synthetic construct
  misc_feature 1..24: note = Synthetic polynucleotide encoding artificial human antibody CDR-H1 region
  source 1..24: mol_type = other DNA
ggatacaccttcaccaactacttt

SEQ ID NO: 2886 - DNA, 24 bp, synthetic construct
  misc_feature 1..24: note = Synthetic polynucleotide encoding artificial human antibody CDR-H1 region
  source 1..24: mol_type = other DNA
ggaggcaccttcaacaactatggt

SEQ ID NO: 2887 - DNA, 24 bp, synthetic construct
  misc_feature 1..24: note = Synthetic polynucleotide encoding artificial human antibody CDR-H1 region
  source 1..24: mol_type = other DNA
ggattcaccttcagtagttatgag

SEQ ID NO: 2888 - DNA, 24 bp, synthetic construct
  misc_feature 1..24: note = Synthetic polynucleotide encoding artificial human antibody CDR-H1 region
  source 1..24: mol_type = other DNA
ggattcaccttcacgacctatgct

SEQ ID NO: 2889 - DNA, 24 bp, synthetic construct
  misc_feature 1..24: note = Synthetic polynucleotide encoding artificial human antibody CDR-H1 region
  source 1..24: mol_type = other DNA
ggatacacctttaccagctactgg

SEQ ID NO: 2890 - DNA, 24 bp, synthetic construct
  misc_feature 1..24: note = Synthetic polynucleotide encoding artificial human antibody CDR-H1 region
  source 1..24: mol_type = other DNA
ggactcaccttcagcatttatagc

SEQ ID NO: 2891 - DNA, 30 bp, synthetic construct
  misc_feature 1..30: note = Synthetic polynucleotide encoding artificial human antibody CDR-H1 region
  source 1..30: mol_type = other DNA
gggttctcactcagcaatgctagaatgggt

SEQ ID NO: 2892 - DNA, 24 bp, synthetic construct
  misc_feature 1..24: note = Synthetic polynucleotide encoding artificial human antibody CDR-H1 region
  source 1..24: mol_type = other DNA
ggatacaccttcaccgtctactat

SEQ ID NO: 2893 - DNA, 24 bp, synthetic construct
  misc_feature 1..24: note = Synthetic polynucleotide encoding artificial human antibody CDR-H1 region
  source 1..24: mol_type = other DNA
ggttacacctttaccagctatggt

SEQ ID NO: 2894 - DNA, 30 bp, synthetic construct
  misc_feature 1..30: note = Synthetic polynucleotide encoding artificial human antibody CDR-H1 region
  source 1..30: mol_type = other DNA
ggggacagtgtctctagcaccagtgctgct

SEQ ID NO: 2895 - DNA, 27 bp, synthetic construct
  misc_feature 1..27: note = Synthetic polynucleotide encoding artificial human antibody CDR-H1 region
  source 1..27: mol_type = other DNA
ggtggctccatcagcagtagtaactgc

SEQ ID NO: 2896 - DNA, 24 bp, synthetic construct
  misc_feature 1..24: note = Synthetic polynucleotide encoding artificial human antibody CDR-H1 region
  source 1..24: mol_type = other DNA
gggttcaccgtcagtagcaactac

SEQ ID NO: 2897 - DNA, 24 bp, synthetic construct
  misc_feature 1..24: note = Synthetic polynucleotide encoding artificial human antibody CDR-H1 region
  source 1..24: mol_type = other DNA
ggatacaccttcaccacctactac

SEQ ID NO: 2898 - DNA, 30 bp, synthetic construct
  misc_feature 1..30: note = Synthetic polynucleotide encoding artificial human antibody CDR-H1 region
  source 1..30: mol_type = other DNA
ggtggctccgtcagcagtggtagttactac

SEQ ID NO: 2899 - DNA, 30 bp, synthetic construct
  misc_feature 1..30: note = Synthetic polynucleotide encoding artificial human antibody CDR-H1 region
  source 1..30: mol_type = other DNA
ggtggctccatcagcagtagtttcttctac

SEQ ID NO: 2900 - DNA, 24 bp, synthetic construct
  misc_feature 1..24: note = Synthetic polynucleotide encoding artificial human antibody CDR-H1 region
  source 1..24: mol_type = other DNA
ggattcaccttcagtagctatgct

SEQ ID NO: 2901 - DNA, 24 bp, synthetic construct
  misc_feature 1..24: note = Synthetic polynucleotide encoding artificial human antibody CDR-H1 region
  source 1..24: mol_type = other DNA
ggattcacctttagcacctatgtc

SEQ ID NO: 2902 - DNA, 30 bp, synthetic construct; identical to SEQ ID NO: 2883
  misc_feature 1..30: note = Synthetic polynucleotide encoding artificial human antibody CDR-H1 region
  source 1..30: mol_type = other DNA

SEQ ID NO: 2903 - DNA, 24 bp, synthetic construct
  misc_feature 1..24: note = Synthetic polynucleotide encoding artificial human antibody CDR-H1 region
  source 1..24: mol_type = other DNA
ggatacaccttcaccggctactat

SEQ ID NO: 2904 - DNA, 24 bp, synthetic construct
  misc_feature 1..24: note = Synthetic polynucleotide encoding artificial human antibody CDR-H1 region
  source 1..24: mol_type = other DNA
ggatacagctttaccagctactgg

SEQ ID NO: 2905 - DNA, 24 bp, synthetic construct
  misc_feature 1..24: note = Synthetic polynucleotide encoding artificial human antibody CDR-H1 region
  source 1..24: mol_type = other DNA
ggatacagctttaccacctactgg

SEQ ID NO: 2906 - DNA, 24 bp, synthetic construct
  misc_feature 1..24: note = Synthetic polynucleotide encoding artificial human antibody CDR-H1 region
  source 1..24: mol_type = other DNA
ggattcacctttagaatctatgcc

SEQ ID NO: 2907 - DNA, 24 bp, synthetic construct
  misc_feature 1..24: note = Synthetic polynucleotide encoding artificial human antibody CDR-H1 region
  source 1..24: mol_type = other DNA
ggatacaccttcaccagctactat

SEQ ID NO: 2908 - DNA, 24 bp, synthetic construct
  misc_feature 1..24: note = Synthetic polynucleotide encoding artificial human antibody CDR-H1 region
  source 1..24: mol_type = other DNA
ggattagacttcagggactactat

SEQ ID NO: 2909 - DNA, 24 bp, synthetic construct
  misc_feature 1..24: note = Synthetic polynucleotide encoding artificial human antibody CDR-H1 region
  source 1..24: mol_type = other DNA
ggattcacctttatcagttatgcc

SEQ ID NO: 2910 - DNA, 24 bp, synthetic construct
  misc_feature 1..24: note = Synthetic polynucleotide encoding artificial human antibody CDR-H1 region
  source 1..24: mol_type = other DNA
ggatacaccttcactagtcatgcc

SEQ ID NO: 2911 - DNA, 24 bp, synthetic construct
  misc_feature 1..24: note = Synthetic polynucleotide encoding artificial human antibody CDR-H1 region
  source 1..24: mol_type = other DNA
ggatacaccttcactaactatgct

SEQ ID NO: 2912 - DNA, 24 bp, synthetic construct
  misc_feature 1..24: note = Synthetic polynucleotide encoding artificial human antibody CDR-H1 region
  source 1..24: mol_type = other DNA
ggattcaccttcagtaactttgct

SEQ ID NO: 2913 - DNA, 24 bp, synthetic construct
  misc_feature 1..24: note = Synthetic polynucleotide encoding artificial human antibody CDR-H1 region
  source 1..24: mol_type = other DNA
ggattcaccttcagtcactacgcc

SEQ ID NO: 2914 - DNA, 24 bp, synthetic construct
  misc_feature 1..24: note = Synthetic polynucleotide encoding artificial human antibody CDR-H1 region
  source 1..24: mol_type = other DNA
ggattcaccttcagtagctatagc

SEQ ID NO: 2915 - DNA, 30 bp, synthetic construct
  misc_feature 1..30: note = Synthetic polynucleotide encoding artificial human antibody CDR-H1 region
  source 1..30: mol_type = other DNA
gggttctcactcagtactaatggagtgggt

SEQ ID NO: 2916 - DNA, 30 bp, synthetic construct
  misc_feature 1..30: note = Synthetic polynucleotide encoding artificial human antibody CDR-H1 region
  source 1..30: mol_type = other DNA
gggttgtcactcagcactagtggagtggct

SEQ ID NO: 2917 - DNA, 30 bp, synthetic construct
  misc_feature 1..30: note = Synthetic polynucleotide encoding artificial human antibody CDR-H1 region
  source 1..30: mol_type = other DNA
ggtggctccatcagcagcggtggttactgc

SEQ ID NO: 2918 - DNA, 24 bp, synthetic construct
  misc_feature 1..24: note = Synthetic polynucleotide encoding artificial human antibody CDR-H1 region
  source 1..24: mol_type = other DNA
ggattcacctttagtagctattgg

SEQ ID NO: 2919 - DNA, 24 bp, synthetic construct
  misc_feature 1..24: note = Synthetic polynucleotide encoding artificial human antibody CDR-H1 region
  source 1..24: mol_type = other DNA
agaggcaccttcagcaaccatgct

SEQ ID NO: 2920 - DNA, 24 bp, synthetic construct
  misc_feature 1..24: note = Synthetic polynucleotide encoding artificial human antibody CDR-H1 region
  source 1..24: mol_type = other DNA
ggaggcaccttcaacttctatgct

SEQ ID NO: 2921 - DNA, 24 bp, synthetic construct
  misc_feature 1..24: note = Synthetic polynucleotide encoding artificial human antibody CDR-H1 region
  source 1..24: mol_type = other DNA
ggatataacttcattgacaatgct

SEQ ID NO: 2922 - DNA, 24 bp, synthetic construct
  misc_feature 1..24: note = Synthetic polynucleotide encoding artificial human antibody CDR-H1 region
  source 1..24: mol_type = other DNA
ggttacacttttacccactatggt

SEQ ID NO: 2923 - DNA, 24 bp, synthetic construct
  misc_feature 1..24: note = Synthetic polynucleotide encoding artificial human antibody CDR-H1 region
  source 1..24: mol_type = other DNA
ggattcacctttagcaactatgcc

SEQ ID NO: 2924 - DNA, 24 bp, synthetic construct
  misc_feature 1..24: note = Synthetic polynucleotide encoding artificial human antibody CDR-H1 region
  source 1..24: mol_type = other DNA
ggatacaccttcagcagctactat

SEQ ID NO: 2925 - DNA, 24 bp, synthetic construct
  misc_feature 1..24: note = Synthetic polynucleotide encoding artificial human antibody CDR-H1 region
  source 1..24: mol_type = other DNA
ggatacaactttagtcgctactgg

SEQ ID NO: 2926 - DNA, 24 bp, synthetic construct
  misc_feature 1..24: note = Synthetic polynucleotide encoding artificial human antibody CDR-H1 region
  source 1..24: mol_type = other DNA
ggattcaccttcaatagatatggc

SEQ ID NO: 2927 - DNA, 24 bp, synthetic construct
  misc_feature 1..24: note = Synthetic polynucleotide encoding artificial human antibody CDR-H1 region
  source 1..24: mol_type = other DNA
ggatacagctttaccagcttctgg

SEQ ID NO: 2928 - DNA, 24 bp, synthetic construct
  misc_feature 1..24: note = Synthetic polynucleotide encoding artificial human antibody CDR-H1 region
  source 1..24: mol_type = other DNA
ggattcaccctggatgattatgtc

SEQ ID NO: 2929 - DNA, 30 bp, synthetic construct
  misc_feature 1..30: note = Synthetic polynucleotide encoding artificial human antibody CDR-H1 region
  source 1..30: mol_type = other DNA
ggtgactccatcagtagtagcggtttcttc

SEQ ID NO: 2930 - DNA, 24 bp, synthetic construct
  misc_feature 1..24: note = Synthetic polynucleotide encoding artificial human antibody CDR-H1 region
  source 1..24: mol_type = other DNA
ggaggccccttcaagacctaccct

SEQ ID NO: 2931 - DNA, 24 bp, synthetic construct
  misc_feature 1..24: note = Synthetic polynucleotide encoding artificial human antibody CDR-H1 region
  source 1..24: mol_type = other DNA
ggattcacctttggtgataatgct

SEQ ID NO: 2932 - DNA, 24 bp, synthetic construct
  misc_feature 1..24: note = Synthetic polynucleotide encoding artificial human antibody CDR-H1 region
  source 1..24: mol_type = other DNA
ggttacacctttagtaattacggt

SEQ ID NO: 2933 - DNA, 24 bp, synthetic construct
  misc_feature 1..24: note = Synthetic polynucleotide encoding artificial human antibody CDR-H1 region
  source 1..24: mol_type = other DNA
ggattcgactttacttcgtattgg

SEQ ID NO: 2934 - DNA, 24 bp, synthetic construct
  misc_feature 1..24: note = Synthetic polynucleotide encoding artificial human antibody CDR-H1 region
  source 1..24: mol_type = other DNA
ggattcaccttcagtagctatagc

SEQ ID NO: 2935 - DNA, 30 bp, synthetic construct
  misc_feature 1..30: note = Synthetic polynucleotide encoding artificial human antibody CDR-H1 region
  source 1..30: mol_type = other DNA
ggtgtctccatcggcaccagtagttactat

SEQ ID NO: 2936 - DNA, 24 bp, synthetic construct
  misc_feature 1..24: note = Synthetic polynucleotide encoding artificial human antibody CDR-H1 region
  source 1..24: mol_type = other DNA
ggtgactccttcagtgattactac

SEQ ID NO: 2937 - DNA, 24 bp, synthetic construct
  misc_feature 1..24: note = Synthetic polynucleotide encoding artificial human antibody CDR-H1 region
  source 1..24: mol_type = other DNA
ggattcaccttcagtaattatgcc

SEQ ID NO: 2938 - DNA, 24 bp, synthetic construct
  misc_feature 1..24: note = Synthetic polynucleotide encoding artificial human antibody CDR-H1 region
  source 1..24: mol_type = other DNA
ggttacagatttaccagcaatggt

SEQ ID NO: 2939 - DNA, 24 bp, synthetic construct
  misc_feature 1..24: note = Synthetic polynucleotide encoding artificial human antibody CDR-H1 region
  source 1..24: mol_type = other DNA
ggattcacctttgatgattatggc

SEQ ID NO: 2940 - DNA, 24 bp, synthetic construct
  misc_feature 1..24: note = Synthetic polynucleotide encoding artificial human antibody CDR-H1 region
  source 1..24: mol_type = other DNA
ggattcagtttcagtgcctatggc

SEQ ID NO: 2941 - DNA, 24 bp, synthetic construct
  misc_feature 1..24: note = Synthetic polynucleotide encoding artificial human antibody CDR-H1 region
  source 1..24: mol_type = other DNA
gaattcacctttagcgcctatgcc

SEQ ID NO: 2942 - DNA, 24 bp, synthetic construct
  misc_feature 1..24: note = Synthetic polynucleotide encoding artificial human antibody CDR-H1 region
  source 1..24: mol_type = other DNA
ggtttcactttcagtaacgcctgg

SEQ ID NO: 2943 - DNA, 24 bp, synthetic construct
  misc_feature 1..24: note = Synthetic polynucleotide encoding artificial human antibody CDR-H1 region
  source 1..24: mol_type = other DNA
ggactcaccttcagtgactatggc

SEQ ID NO: 2944 - DNA, 24 bp, synthetic construct
  misc_feature 1..24: note = Synthetic polynucleotide encoding artificial human antibody CDR-H1 region
  source 1..24: mol_type = other DNA
ggttacgtctttaccagctttggg

SEQ ID NO: 2945 - DNA, 24 bp, synthetic construct
  misc_feature 1..24: note = Synthetic polynucleotide encoding artificial human antibody CDR-H1 region
  source 1..24: mol_type = other DNA
ggattcaccttcgaagacttcggc

SEQ ID NO: 2946 - DNA, 24 bp, synthetic construct
  misc_feature 1..24: note = Synthetic polynucleotide encoding artificial human antibody CDR-H1 region
  source 1..24: mol_type = other DNA
ggattcaccctcagtacctatggc

SEQ ID NO: 2947 - DNA, 24 bp, synthetic construct
  misc_feature 1..24: note = Synthetic polynucleotide encoding artificial human antibody CDR-H1 region
  source 1..24: mol_type = other DNA
ggatataccttcagtaactatgct

SEQ ID NO: 2948 - DNA, 24 bp, synthetic construct
  misc_feature 1..24: note = Synthetic polynucleotide encoding artificial human antibody CDR-H1 region
  source 1..24: mol_type = other DNA
ggatacagcttttccacctactgg

SEQ ID NO: 2949 - DNA, 30 bp, synthetic construct
  misc_feature 1..30: note = Synthetic polynucleotide encoding artificial human antibody CDR-H1 region
  source 1..30: mol_type = other DNA
gggttctcactcaccacatatggagtgggt

SEQ ID NO: 2950 - DNA, 24 bp, synthetic construct
  misc_feature 1..24: note = Synthetic polynucleotide encoding artificial human antibody CDR-H1 region
  source 1..24: mol_type = other DNA
ggattcaccttcagtgcttatggc

SEQ ID NO: 2951 - DNA, 24 bp, synthetic construct
  misc_feature 1..24: note = Synthetic polynucleotide encoding artificial human antibody CDR-H1 region
  source 1..24: mol_type = other DNA
ggaggcaccttcagcgaatatggt

SEQ ID NO: 2952 - DNA, 30 bp, synthetic construct
  misc_feature 1..30: note = Synthetic polynucleotide encoding artificial human antibody CDR-H1 region
  source 1..30: mol_type = other DNA
ggtgcctccgtcaacagtgggactcacttc

SEQ ID NO: 2953 - DNA, 24 bp, synthetic construct
  misc_feature 1..24: note = Synthetic polynucleotide encoding artificial human antibody CDR-H1 region
  source 1..24: mol_type = other DNA
ggattcaccttcagtagctatgct

SEQ ID NO: 2954 - DNA, 24 bp, synthetic construct
  misc_feature 1..24: note = Synthetic polynucleotide encoding artificial human antibody CDR-H1 region
  source 1..24: mol_type = other DNA
ggattcaccttcagtagctatagc

SEQ ID NO: 2955 - DNA, 30 bp, synthetic construct
  misc_feature 1..30: note = Synthetic polynucleotide encoding artificial human antibody CDR-H1 region
  source 1..30: mol_type = other DNA
ggtgactccatcagcaggagtaattactac

SEQ ID NO: 2956 - DNA, 24 bp, synthetic construct
  misc_feature 1..24: note = Synthetic polynucleotide encoding artificial human antibody CDR-H1 region
  source 1..24: mol_type = other DNA
ggattcacctttagtaagttttgg

SEQ ID NO: 2957 - DNA, 30 bp, synthetic construct
  misc_feature 1..30: note = Synthetic polynucleotide encoding artificial human antibody CDR-H1 region
  source 1..30: mol_type = other DNA
gggttctctctgaccactactggagtgggt

SEQ ID NO: 2958 - DNA, 24 bp, synthetic construct
  misc_feature 1..24: note = Synthetic polynucleotide encoding artificial human antibody CDR-H1 region
  source 1..24: mol_type = other DNA
ggattcatcttcagtagctatggc

SEQ ID NO: 2959 - DNA, 24 bp, synthetic construct
  misc_feature 1..24: note = Synthetic polynucleotide encoding artificial human antibody CDR-H1 region
  source 1..24: mol_type = other DNA
ggattcaccttcagtagttatgaa

SEQ ID NO: 2960 - DNA, 24 bp, synthetic construct
  misc_feature 1..24: note = Synthetic polynucleotide encoding artificial human antibody CDR-H1 region
  source 1..24: mol_type = other DNA
ggattcaccttcagtagctatagc

SEQ ID NO: 2961 - DNA, 30 bp, synthetic construct
  misc_feature 1..30: note = Synthetic polynucleotide encoding artificial human antibody CDR-H1 region
  source 1..30: mol_type = other DNA
gggttctcactcagcactagtggaatgtgt

SEQ ID NO: 2962 - DNA, 24 bp, synthetic construct
  misc_feature 1..24: note = Synthetic polynucleotide encoding artificial human antibody CDR-H1 region
  source 1..24: mol_type = other DNA
ggattcacctttagtagctattgg

SEQ ID NO: 2963 - DNA, 24 bp, synthetic construct
  misc_feature 1..24: note = Synthetic polynucleotide encoding artificial human antibody CDR-H1 region
  source 1..24: mol_type = other DNA
ggattcacctttgccagctatggc

SEQ ID NO: 2964 - DNA, 24 bp, synthetic construct
  misc_feature 1..24: note = Synthetic polynucleotide encoding artificial human antibody CDR-H1 region
  source 1..24: mol_type = other DNA
ggattcaccttcagtagctatagt

SEQ ID NO: 2965 - DNA, 24 bp, synthetic construct
  misc_feature 1..24: note = Synthetic polynucleotide encoding artificial human antibody CDR-H1 region
  source 1..24: mol_type = other DNA
ggatacatcttcaccggctccttt

SEQ ID NO: 2966 - DNA, 30 bp, synthetic construct
  misc_feature 1..30: note = Synthetic polynucleotide encoding artificial human antibody CDR-H1 region
  source 1..30: mol_type = other DNA
ggtggctccatcagcagtggtacttactac

SEQ ID NO: 2967 - DNA, 24 bp, synthetic construct
  misc_feature 1..24: note = Synthetic polynucleotide encoding artificial human antibody CDR-H1 region
  source 1..24: mol_type = other DNA
ggatacagctttaccaactactgg

SEQ ID NO: 2968 - DNA, 24 bp, synthetic construct
  misc_feature 1..24: note = Synthetic polynucleotide encoding artificial human antibody CDR-H1 region
  source 1..24: mol_type = other DNA
ggattcactttcagtaacgcctgg

SEQ ID NO: 2969 - DNA, 24 bp, synthetic construct
  misc_feature 1..24: note = Synthetic polynucleotide encoding artificial human antibody CDR-H1 region
  source 1..24: mol_type = other DNA
ggattccccttcagtacctatgct

SEQ ID NO: 2970 - DNA, 24 bp, synthetic construct
  misc_feature 1..24: note = Synthetic polynucleotide encoding artificial human antibody CDR-H1 region
  source 1..24: mol_type = other DNA
ggtttctccttcagtggctcttct

SEQ ID NO: 2971 - DNA, 24 bp, synthetic construct
  misc_feature 1..24: note = Synthetic polynucleotide encoding artificial human antibody CDR-H1 region
  source 1..24: mol_type = other DNA
ggtggctccatcagtagttattac

SEQ ID NO: 2972 - DNA, 24 bp, synthetic construct
  misc_feature 1..24: note = Synthetic polynucleotide encoding artificial human antibody CDR-H1 region
  source 1..24: mol_type = other DNA
ggattcacctttggtgattatgct

SEQ ID NO: 2973 - DNA, 24 bp, synthetic construct
  misc_feature 1..24: note = Synthetic polynucleotide encoding artificial human antibody CDR-H1 region
  source 1..24: mol_type = other DNA
ggattcaccctcagtaactatggc

SEQ ID NO: 2974 - DNA, 24 bp, synthetic construct
  misc_feature 1..24: note = Synthetic polynucleotide encoding artificial human antibody CDR-H1 region
  source 1..24: mol_type = other DNA
ggattcagcatcactacccatagc

SEQ ID NO: 2975 - DNA, 24 bp, synthetic construct
  misc_feature 1..24: note = Synthetic polynucleotide encoding artificial human antibody CDR-H1 region
  source 1..24: mol_type = other DNA
ggattcaccttcagtagttatgag

SEQ ID NO: 2976 - DNA, 24 bp, synthetic construct
  misc_feature 1..24: note = Synthetic polynucleotide encoding artificial human antibody CDR-H1 region
  source 1..24: mol_type = other DNA
ggattcaccttcagtagctatagc

SEQ ID NO: 2977 - DNA, 24 bp, synthetic construct
  misc_feature 1..24: note = Synthetic polynucleotide encoding artificial human antibody CDR-H1 region
  source 1..24: mol_type = other DNA
gggttcagcgtcagtagcaagtac

SEQ ID NO: 2978 - DNA, 24 bp, synthetic construct
  misc_feature 1..24: note = Synthetic polynucleotide encoding artificial human antibody CDR-H1 region
  source 1..24: mol_type = other DNA
ggatacagctttaccaactactgg

SEQ ID NO: 2979 - DNA, 24 bp, synthetic construct
  misc_feature 1..24: note = Synthetic polynucleotide encoding artificial human antibody CDR-H1 region
  source 1..24: mol_type = other DNA
gggttcaccttcagtggctctgct

SEQ ID NO: 2980 - DNA, 24 bp, synthetic construct
  misc_feature 1..24: note = Synthetic polynucleotide encoding artificial human antibody CDR-H1 region
  source 1..24: mol_type = other DNA
ggattcaccttcagtgactatggc

SEQ ID NO: 2981 - DNA, 24 bp, synthetic construct
  misc_feature 1..24: note = Synthetic polynucleotide encoding artificial human antibody CDR-H1 region
  source 1..24: mol_type = other DNA
ggatacaccttcaataactatggc

SEQ ID NO: 2982 - DNA, 18 bp, synthetic construct
  misc_feature 1..18: note = Synthetic polynucleotide encoding artificial human antibody CDR-L1 region
  source 1..18: mol_type = other DNA
cagggtgttagcagctac

SEQ ID NO: 2983 - DNA, 18 bp, synthetic construct
  misc_feature 1..18: note = Synthetic polynucleotide encoding artificial human antibody CDR-L1 region
  source 1..18: mol_type = other DNA
cagagcattggcagctat

SEQ ID NO: 2984 - DNA, 18 bp, synthetic construct
  misc_feature 1..18: note = Synthetic polynucleotide encoding artificial human antibody CDR-L1 region
  source 1..18: mol_type = other DNA
cagggtattgacgtctgg

SEQ ID NO: 2985 - DNA, 24 bp, synthetic construct
  misc_feature 1..24: note = Synthetic polynucleotide encoding artificial human antibody CDR-L1 region
  source 1..24: mol_type = other DNA
agttccaacatcggaagtaattat

SEQ ID NO: 2986 - DNA, 18 bp, synthetic construct
  misc_feature 1..18: note = Synthetic polynucleotide encoding artificial human antibody CDR-L1 region
  source 1..18: mol_type = other DNA
agcctcagaaactattat

SEQ ID NO: 2987 - DNA, 18 bp, synthetic construct
  misc_feature 1..18: note = Synthetic polynucleotide encoding artificial human antibody CDR-L1 region
  source 1..18: mol_type = other DNA
aacattggaattaaaagt

SEQ ID NO: 2988 - DNA, 18 bp, synthetic construct
  misc_feature 1..18: note = Synthetic polynucleotide encoding artificial human antibody CDR-L1 region
  source 1..18: mol_type = other DNA
cagagcataagcagttat

SEQ ID NO: 2989 - DNA, 21 bp, synthetic construct
  misc_feature 1..21: note = Synthetic polynucleotide encoding artificial human antibody CDR-L1 region
  source 1..21: mol_type = other DNA
cagagtgttagcagcagctac

SEQ ID NO: 2990 - DNA, 24 bp, synthetic construct
  misc_feature 1..24: note = Synthetic polynucleotide encoding artificial human antibody CDR-L1 region
  source 1..24: mol_type = other DNA
agtggcaacattgccagctactat

SEQ ID NO: 2991 - DNA, 21 bp, synthetic construct
  misc_feature 1..21: note = Synthetic polynucleotide encoding artificial human antibody CDR-L1 region
  source 1..21: mol_type = other DNA
cagagtgttagcagcagttac

SEQ ID NO: 2992 - DNA, 24 bp, synthetic construct
  misc_feature 1..24: note = Synthetic polynucleotide encoding artificial human antibody CDR-L1 region
  source 1..24: mol_type = other DNA
agctccaatattgagaataatgat

SEQ ID NO: 2993 - DNA, 33 bp, synthetic construct
  misc_feature 1..33: note = Synthetic polynucleotide encoding artificial human antibody CDR-L1 region
  source 1..33: mol_type = other DNA
caaagcctcgtacacagtgatggaaacacctac

SEQ ID NO: 2994 - DNA, 24 bp, synthetic construct
  misc_feature 1..24: note = Synthetic polynucleotide encoding artificial human antibody CDR-L1 region
  source 1..24: mol_type = other DNA
agctccaatatcgggagaaattat

SEQ ID NO: 2995 - DNA, 24 bp, synthetic construct
  misc_feature 1..24: note = Synthetic polynucleotide encoding artificial human antibody CDR-L1 region
  source 1..24: mol_type = other DNA
atctccaacatcggaagtaatcct

SEQ ID NO: 2996 - DNA, 18 bp, synthetic construct
  misc_feature 1..18: note = Synthetic polynucleotide encoding artificial human antibody CDR-L1 region
  source 1..18: mol_type = other DNA
cagaatgttaacttcaac

SEQ ID NO: 2997 - DNA, 21 bp, synthetic construct
  misc_feature 1..21: note = Synthetic polynucleotide encoding artificial human antibody CDR-L1 region
  source 1..21: mol_type = other DNA
cagagtgttagcagcagctcc

SEQ ID NO: 2998 - DNA, 18 bp, synthetic construct
  misc_feature 1..18: note = Synthetic polynucleotide encoding artificial human antibody CDR-L1 region
  source 1..18: mol_type = other DNA
gctttgccaaagcaatat

SEQ ID NO: 2999 - DNA, 18 bp, synthetic construct
  misc_feature 1..18: note = Synthetic polynucleotide encoding artificial human antibody CDR-L1 region
  source 1..18: mol_type = other DNA
cagagtgttagcagctac

SEQ ID NO: 3000 - DNA, 18 bp, synthetic construct
  misc_feature 1..18: note = Synthetic polynucleotide encoding artificial human antibody CDR-L1 region
  source 1..18: mol_type = other DNA
cagagtgttggcagctac

SEQ ID NO: 3001 - DNA, 18 bp, synthetic construct
  misc_feature 1..18: note = Synthetic polynucleotide encoding artificial human antibody CDR-L1 region
  source 1..18: mol_type = other DNA
caggccattgccaactct

SEQ ID NO: 3002 - DNA, 36 bp, synthetic construct
  misc_feature 1..36: note = Synthetic polynucleotide encoding artificial human antibody CDR-L1 region
  source 1..36: mol_type = other DNA
cagagtgttttatacagctccaacaatgagaactac

SEQ ID NO: 3003 - DNA, 18 bp, synthetic construct
  misc_feature 1..18: note = Synthetic polynucleotide encoding artificial human antibody CDR-L1 region
  source 1..18: mol_type = other DNA
cacaacattaacacctat

SEQ ID NO: 3004 - DNA, 27 bp, synthetic construct
  misc_feature 1..27: note = Synthetic polynucleotide encoding artificial human antibody CDR-L1 region
  source 1..27: mol_type = other DNA
agcagtgacgttggtggttataactat

SEQ ID NO: 3005 - DNA, 24 bp, synthetic construct
  misc_feature 1..24: note = Synthetic polynucleotide encoding artificial human antibody CDR-L1 region
  source 1..24: mol_type = other DNA
agcgccaacatcggaaagaattat

SEQ ID NO: 3006 - DNA, 18 bp, synthetic construct
  misc_feature 1..18: note = Synthetic polynucleotide encoding artificial human antibody CDR-L1 region
  source 1..18: mol_type = other DNA
cagagcattagcacttat

SEQ ID NO: 3007 - DNA, 18 bp, synthetic construct
  misc_feature 1..18: note = Synthetic polynucleotide encoding artificial human antibody CDR-L1 region
  source 1..18: mol_type = other DNA
cagagcattaagaactat

SEQ ID NO: 3008 - DNA, 27 bp, synthetic construct
  misc_feature 1..27: note = Synthetic polynucleotide encoding artificial human antibody CDR-L1 region
  source 1..27: mol_type = other DNA
agctccaacatcggggcaggttatgat

SEQ ID NO: 3009 - DNA, 18 bp, synthetic construct
  misc_feature 1..18: note = Synthetic polynucleotide encoding artificial human antibody CDR-L1 region
  source 1..18: mol_type = other DNA
aacattggaagtaaaact

SEQ ID NO: 3010 - DNA, 18 bp, synthetic construct
  misc_feature 1..18: note = Synthetic polynucleotide encoding artificial human antibody CDR-L1 region
  source 1..18: mol_type = other DNA
caggatattagcaactgg

SEQ ID NO: 3011 - DNA, 18 bp, synthetic construct
  misc_feature 1..18: note = Synthetic polynucleotide encoding artificial human antibody CDR-L1 region
  source 1..18: mol_type = other DNA
gcattgccaaacgaaaat

SEQ ID NO: 3012 - DNA, 27 bp, synthetic construct
  misc_feature 1..27: note = Synthetic polynucleotide encoding artificial human antibody CDR-L1 region
  source 1..27: mol_type = other DNA
accagtgacattggtagttatgaccgt

SEQ ID NO: 3013 - DNA, 24 bp, synthetic construct
  misc_feature 1..24: note = Synthetic polynucleotide encoding artificial human antibody CDR-L1 region
  source 1..24: mol_type = other DNA
agctccaacattgggaacaattat

SEQ ID NO: 3014 - DNA, 33 bp, synthetic construct
  misc_feature 1..33: note = Synthetic polynucleotide encoding artificial human antibody CDR-L1 region
  source 1..33: mol_type = other DNA
caaagcctcgtatacagtgatggaaacacctac

SEQ ID NO: 3015 - DNA, 21 bp, synthetic construct
  misc_feature 1..21: note = Synthetic polynucleotide encoding artificial human antibody CDR-L1 region
  source 1..21: mol_type = other DNA
cagagtattagaagcagctac

SEQ ID NO: 3016 - DNA, 27 bp, synthetic construct
  misc_feature 1..27: note = Synthetic polynucleotide encoding artificial human antibody CDR-L1 region
  source 1..27: mol_type = other DNA
acctccaacatcggggctggttatgat

SEQ ID NO: 3017 - DNA, 18 bp, synthetic construct
  misc_feature 1..18: note = Synthetic polynucleotide encoding artificial human antibody CDR-L1 region
  source 1..18: mol_type = other DNA
cagagcattagcagctat

SEQ ID NO: 3018 - DNA, 36 bp, synthetic construct
  misc_feature 1..36: note = Synthetic polynucleotide encoding artificial human antibody CDR-L1 region
  source 1..36: mol_type = other DNA
cagaatgttttatacagttccaacaataaaaactac

SEQ ID NO: 3019 - DNA, 27 bp, synthetic construct
  misc_feature 1..27: note = Synthetic polynucleotide encoding artificial human antibody CDR-L1 region
  source 1..27: mol_type = other DNA
agctccaacatcggggcaggttatgat

SEQ ID NO: 3020 - DNA, 24 bp, synthetic construct
  misc_feature 1..24: note = Synthetic polynucleotide encoding artificial human antibody CDR-L1 region
  source 1..24: mol_type = other DNA
agtggcagcattgccagcagctat

SEQ ID NO: 3021 - DNA, 18 bp, synthetic construct
  misc_feature 1..18: note = Synthetic polynucleotide encoding artificial human antibody CDR-L1 region
  source 1..18: mol_type = other DNA
cagagcattagcagctat

SEQ ID NO: 3022 - DNA, 18 bp, synthetic construct
  misc_feature 1..18: note = Synthetic polynucleotide encoding artificial human antibody CDR-L1 region
  source 1..18: mol_type = other DNA
aacattggaagtaaaagt

SEQ ID NO: 3023 - DNA, 27 bp, synthetic construct
  misc_feature 1..27: note = Synthetic polynucleotide encoding artificial human antibody CDR-L1 region
  source 1..27: mol_type = other DNA
agcagtgacgttggtggttataactat

SEQ ID NO: 3024 - DNA, 18 bp, synthetic construct
  misc_feature 1..18: note = Synthetic polynucleotide encoding artificial human antibody CDR-L1 region
  source 1..18: mol_type = other DNA
cagagcattagcagctat

SEQ ID NO: 3025 - DNA, 18 bp, synthetic construct
  misc_feature 1..18: note = Synthetic polynucleotide encoding artificial human antibody CDR-L1 region
  source 1..18: mol_type = other DNA
cagggcattaacagtgcc

SEQ ID NO: 3026 - DNA, 18 bp, synthetic construct
  misc_feature 1..18: note = Synthetic polynucleotide encoding artificial human antibody CDR-L1 region
  source 1..18: mol_type = other DNA
agcctcagaaggtattat

SEQ ID NO: 3027 - DNA, 18 bp, synthetic construct
  misc_feature 1..18: note = Synthetic polynucleotide encoding artificial human antibody CDR-L1 region
  source 1..18: mol_type = other DNA
cagggtattaggaattgg

SEQ ID NO: 3028 - DNA, 18 bp, synthetic construct
  misc_feature 1..18: note = Synthetic polynucleotide encoding artificial human antibody CDR-L1 region
  source 1..18: mol_type = other DNA
cagagcgttggcacctat

SEQ ID NO: 3029 - DNA, 21 bp, synthetic construct
  misc_feature 1..21: note = Synthetic polynucleotide encoding artificial human antibody CDR-L1 region
  source 1..21: mol_type = other DNA
cagagcgttagcagtaattac

SEQ ID NO: 3030 - DNA, 21 bp, synthetic construct
  misc_feature 1..21: note = Synthetic polynucleotide encoding artificial human antibody CDR-L1 region
  source 1..21: mol_type = other DNA
cagagtgttagcagcaggtac

SEQ ID NO: 3031 - DNA, 18 bp, synthetic construct
  misc_feature 1..18: note = Synthetic polynucleotide encoding artificial human antibody CDR-L1 region
  source 1..18: mol_type = other DNA
cagagtgttggcagctcc

SEQ ID NO: 3032 - DNA, 18 bp, synthetic construct
  misc_feature 1..18: note = Synthetic polynucleotide encoding artificial human antibody CDR-L1 region
  source 1..18: mol_type = other DNA
cagagtattagtagctgg

SEQ ID NO: 3033 - DNA, 18 bp, synthetic construct
  misc_feature 1..18: note = Synthetic polynucleotide encoding artificial human antibody CDR-L1 region
  source 1..18: mol_type = other DNA
aacattggaagtaaaagt

SEQ ID NO: 3034 - DNA, 18 bp, synthetic construct
  misc_feature 1..18: note = Synthetic polynucleotide encoding artificial human antibody CDR-L1 region
  source 1..18: mol_type = other DNA
cagagtgttagcacctac

SEQ ID NO: 3035 - DNA, 33 bp, synthetic construct
  misc_feature 1..33: note = Synthetic polynucleotide encoding artificial human antibody CDR-L1 region
  source 1..33: mol_type = other DNA
cagagcctcctgcatagtaatggatacaactat

SEQ ID NO: 3036 - DNA, 18 bp, synthetic construct
  misc_feature 1..18: note = Synthetic polynucleotide encoding artificial human antibody CDR-L1 region
  source 1..18: mol_type = other DNA
cagagtattagtagctgg

SEQ ID NO: 3037 - DNA, 27 bp, synthetic construct
  misc_feature 1..27: note = Synthetic polynucleotide encoding artificial human antibody CDR-L1 region
  source 1..27: mol_type = other DNA
tctggctcagtctcaactggaaactac

SEQ ID NO: 3038 - DNA, 21 bp, synthetic construct
  misc_feature 1..21: note = Synthetic polynucleotide encoding artificial human antibody CDR-L1 region
  source 1..21: mol_type = other DNA
cagagtgttagcagcagctac

SEQ ID NO: 3039 - DNA, 18 bp, synthetic construct
  misc_feature 1..18: note = Synthetic polynucleotide encoding artificial human antibody CDR-L1 region
  source 1..18: mol_type = other DNA
aacattggaagtaagagt

SEQ ID NO: 3040 - DNA, 18 bp, synthetic construct
  misc_feature 1..18: note = Synthetic polynucleotide encoding artificial human antibody CDR-L1 region
  source 1..18: mol_type = other DNA
cagagtattagtaggtgg

SEQ ID NO: 3041 - DNA, 18 bp, synthetic construct
  misc_feature 1..18: note = Synthetic polynucleotide encoding artificial human antibody CDR-L1 region
  source 1..18: mol_type = other DNA
caagacattgatgatgat

SEQ ID NO: 3042 - DNA, 21 bp, synthetic construct
  misc_feature 1..21: note = Synthetic polynucleotide encoding artificial human antibody CDR-L1 region
  source 1..21: mol_type = other DNA
cagagtattggcgccgcctac

SEQ ID NO: 3043 - DNA, 18 bp, synthetic construct
  misc_feature 1..18: note = Synthetic polynucleotide encoding artificial human antibody CDR-L1 region
  source 1..18: mol_type = other DNA
gcattgccaaaaaaatat

SEQ ID NO: 3044 - DNA, 33 bp, synthetic construct
  misc_feature 1..33: note = Synthetic polynucleotide encoding artificial human antibody CDR-L1 region
  source 1..33: mol_type = other DNA
cagagcctcctgcatagtgatggatacaactat

SEQ ID NO: 3045 - DNA, 27 bp, synthetic construct
  misc_feature 1..27: note = Synthetic polynucleotide encoding artificial human antibody CDR-L1 region
  source 1..27: mol_type = other DNA
agcagtgacgttggtggttataactat

SEQ ID NO: 3046 - DNA, 18 bp, synthetic construct
  misc_feature 1..18: note = Synthetic polynucleotide encoding artificial human antibody CDR-L1 region
  source 1..18: mol_type = other DNA
cagagtattagcagtaac

SEQ ID NO: 3047 - DNA, 27 bp, synthetic construct
  misc_feature 1..27: note = Synthetic polynucleotide encoding artificial human antibody CDR-L1 region
  source 1..27: mol_type = other DNA
agcagtgacgttggtggttataactat

SEQ ID NO: 3048 - DNA, 33 bp, synthetic construct
  misc_feature 1..33: note = Synthetic polynucleotide encoding artificial human antibody CDR-L1 region
  source 1..33: mol_type = other DNA
cagcgcctcctgcatagtgatggaaagacctat

SEQ ID NO: 3049 - DNA, 21 bp, synthetic construct
  misc_feature 1..21: note = Synthetic polynucleotide encoding artificial human antibody CDR-L1 region
  source 1..21: mol_type = other DNA
cagagtgtcagcagtagcttc

SEQ ID NO: 3050 - DNA, 18 bp, synthetic construct
  misc_feature 1..18: note = Synthetic polynucleotide encoding artificial human antibody CDR-L1 region
  source 1..18: mol_type = other DNA
caggacgttgacacttat

SEQ ID NO: 3051 - DNA, 24 bp, synthetic construct
  misc_feature 1..24: note = Synthetic polynucleotide encoding artificial human antibody CDR-L1 region
  source 1..24: mol_type = other DNA
agctccaatattgggaaatattct

SEQ ID NO: 3052 - DNA, 18 bp, synthetic construct
  misc_feature 1..18: note = Synthetic polynucleotide encoding artificial human antibody CDR-L1 region
  source 1..18: mol_type = other DNA
cagagtgttggtagctcc

SEQ ID NO: 3053 - DNA, 21 bp, synthetic construct
  misc_feature 1..21: note = Synthetic polynucleotide encoding artificial human antibody CDR-L1 region
  source 1..21: mol_type = other DNA
cagagtgttagcagcagctac

SEQ ID NO: 3054 - DNA, 18 bp, synthetic construct
  misc_feature 1..18: note = Synthetic polynucleotide encoding artificial human antibody CDR-L1 region
  source 1..18: mol_type = other DNA
cagagtattagtgtctgg

SEQ ID NO: 3055 - DNA, 18 bp, synthetic construct
  misc_feature 1..18: note = Synthetic polynucleotide encoding artificial human antibody CDR-L1 region
  source 1..18: mol_type = other DNA
agtctcagaaggtattat

SEQ ID NO: 3056 - DNA, 18 bp, synthetic construct
  misc_feature 1..18: note = Synthetic polynucleotide encoding artificial human antibody CDR-L1 region
  source 1..18: mol_type = other DNA
cagagcattagcagctat

SEQ ID NO: 3057 - DNA, 21 bp, synthetic construct
  misc_feature 1..21: note = Synthetic polynucleotide encoding artificial human antibody CDR-L1 region
  source 1..21: mol_type = other DNA
cagagtgttagcagcagctac

SEQ ID NO: 3058 - DNA, 24 bp, synthetic construct
  misc_feature 1..24: note = Synthetic polynucleotide encoding artificial human antibody CDR-L1 region
  source 1..24: mol_type = other DNA
agctccaacattgacaataattat

SEQ ID NO: 3059 - DNA, 18 bp, synthetic construct
  misc_feature 1..18: note = Synthetic polynucleotide encoding artificial human antibody CDR-L1 region
  source 1..18: mol_type = other DNA
cagaccattagcacctac

SEQ ID NO: 3060 - DNA, 36 bp, synthetic construct
  misc_feature 1..36: note = Synthetic polynucleotide encoding artificial human antibody CDR-L1 region
  source 1..36: mol_type = other DNA
cagactgttttacacagttccaacaataggaactac

SEQ ID NO: 3061 - DNA, 18 bp, synthetic construct
  misc_feature 1..18: note = Synthetic polynucleotide encoding artificial human antibody CDR-L1 region
  source 1..18: mol_type = other DNA
cagagtgttgacggcaac

SEQ ID NO: 3062 - DNA, 18 bp, synthetic construct
  misc_feature 1..18: note = Synthetic polynucleotide encoding artificial human antibody CDR-L1 region
  source 1..18: mol_type = other DNA
cagagcattagcaactat

SEQ ID NO: 3063 - DNA, 27 bp, synthetic construct
  misc_feature 1..27: note = Synthetic polynucleotide encoding artificial human antibody CDR-L1 region
  source 1..27: mol_type = other DNA
agctccaacatcggggcaggttatgat

SEQ ID NO: 3064 - DNA, 18 bp, synthetic construct
  misc_feature 1..18: note = Synthetic polynucleotide encoding artificial human antibody CDR-L1 region
  source 1..18: mol_type = other DNA
cagagtgtgagcaccaac

SEQ ID NO: 3065 - DNA, 18 bp, synthetic construct
  misc_feature 1..18: note = Synthetic polynucleotide encoding artificial human antibody CDR-L1 region
  source 1..18: mol_type = other DNA
cagagtgtgagtggctac

SEQ ID NO: 3066 - DNA, 24 bp, synthetic construct
  misc_feature 1..24: note = Synthetic polynucleotide encoding artificial human antibody CDR-L1 region
  source 1..24: mol_type = other DNA
aggtccaacgtcgccagtcatgct

SEQ ID NO: 3067 - DNA, 36 bp, synthetic construct
  misc_feature 1..36: note = Synthetic polynucleotide encoding artificial human antibody CDR-L1 region
  source 1..36: mol_type = other DNA
cagagcctcttggacagtgatgatggaaaaacctat

SEQ ID NO: 3068 - DNA, 18 bp, synthetic construct
  misc_feature 1..18: note = Synthetic polynucleotide encoding artificial human antibody CDR-L1 region
  source 1..18: mol_type = other DNA
aaattgggggataaatat

SEQ ID NO: 3069 - DNA, 18 bp, synthetic construct
  misc_feature 1..18: note = Synthetic polynucleotide encoding artificial human antibody CDR-L1 region
  source 1..18: mol_type = other DNA
aaattgggggatatatgt

SEQ ID NO: 3070 - DNA, 36 bp, synthetic construct
  misc_feature 1..36: note = Synthetic polynucleotide encoding artificial human antibody CDR-L1 region
  source 1..36: mol_type = other DNA
cagagtcttttctatagctccaacaataagaactac

SEQ ID NO: 3071 - DNA, 18 bp, synthetic construct
  misc_feature 1..18: note = Synthetic polynucleotide encoding artificial human antibody CDR-L1 region
  source 1..18: mol_type = other DNA
cagagtgttagcagctac

SEQ ID NO: 3072 - DNA, 18 bp, synthetic construct
  misc_feature 1..18: note = Synthetic polynucleotide encoding artificial human antibody CDR-L1 region
  source 1..18: mol_type = other DNA
cagagtgttagcaactat

SEQ ID NO: 3073 - DNA, 33 bp, synthetic construct
  misc_feature 1..33: note = Synthetic polynucleotide encoding artificial human antibody CDR-L1 region
  source 1..33: mol_type = other DNA
cagagcctcctacagagtaatggaaacaactat

SEQ ID NO: 3074 - DNA, 18 bp, synthetic construct
  misc_feature 1..18: note = Synthetic polynucleotide encoding artificial human antibody CDR-L1 region
  source 1..18: mol_type = other DNA
cagagtattagtggctgg

SEQ ID NO: 3075 - DNA, 24 bp, synthetic construct
  misc_feature 1..24: note = Synthetic polynucleotide encoding artificial human antibody CDR-L1 region
  source 1..24: mol_type = other DNA
agctccaacattggaaataattat

SEQ ID NO: 3076 - DNA, 18 bp, synthetic construct
  misc_feature 1..18: note = Synthetic polynucleotide encoding artificial human antibody CDR-L1 region
  source 1..18: mol_type = other DNA
cagagtgttagcaactat

SEQ ID NO: 3077 - DNA, 33 bp, synthetic construct
  misc_feature 1..33: note = Synthetic polynucleotide encoding artificial human antibody CDR-L1 region
  source 1..33: mol_type = other DNA
cagagcctccttcgtcgtgatggaaacaactat

SEQ ID NO: 3078 - DNA, 27 bp, synthetic construct
  misc_feature 1..27: note = Synthetic polynucleotide encoding artificial human antibody CDR-L1 region
  source 1..27: mol_type = other DNA
agcagtgacgttggtggttttaactat

SEQ ID NO: 3079 - DNA, 33 bp, synthetic construct; identical to SEQ ID NO: 3014
  misc_feature 1..33: note = Synthetic polynucleotide encoding artificial human antibody CDR-L1 region
  source 1..33: mol_type = other DNA

SEQ ID NO: 3080 - DNA, 18 bp, synthetic construct
  misc_feature 1..18: note = Synthetic polynucleotide encoding artificial human antibody CDR-L1 region
  source 1..18: mol_type = other DNA
cagagtattagcagctat

SEQ ID NO: 3081 - DNA, 18 bp, synthetic construct
  misc_feature 1..18: note = Synthetic polynucleotide encoding artificial human antibody CDR-L1 region
  source 1..18: mol_type = other DNA
caggacattagcaactat

SEQ ID NO: 3082 - DNA, 18 bp, synthetic construct
  misc_feature 1..18: note = Synthetic polynucleotide encoding artificial human antibody CDR-L1 region
  source 1..18: mol_type = other DNA
aacattggaagtaaaagt

SEQ ID NO: 3083 - DNA, 18 bp, synthetic construct
  misc_feature 1..18: note = Synthetic polynucleotide encoding artificial human antibody CDR-L1 region
  source 1..18: mol_type = other DNA
caggtcattagcgattat

SEQ ID NO: 3084 - DNA, 18 bp, synthetic construct
  misc_feature 1..18: note = Synthetic polynucleotide encoding artificial human antibody CDR-L1 region
  source 1..18: mol_type = other DNA
cagagcattagcacttat

SEQ ID NO: 3085 - DNA, 18 bp, synthetic construct
  misc_feature 1..18: note = Synthetic polynucleotide encoding artificial human antibody CDR-L1 region
  source 1..18: mol_type = other DNA
cagagaattagtaactgg

SEQ ID NO: 3086 - DNA, 33 bp, synthetic construct
  misc_feature 1..33: note = Synthetic polynucleotide encoding artificial human antibody CDR-L1 region
  source 1..33: mol_type = other DNA
cagagcctcctgaatcctgatggaaagacctat

SEQ ID NO: 3087 - DNA, 18 bp, synthetic construct
  misc_feature 1..18: note = Synthetic polynucleotide encoding artificial human antibody CDR-L1 region
  source 1..18: mol_type = other DNA
cagagcattagcggctat

SEQ ID NO: 3088 - DNA, 27 bp, synthetic construct
  misc_feature 1..27: note = Synthetic polynucleotide encoding artificial human antibody CDR-L1 region
  source 1..27: mol_type = other DNA
agctccaacgtcggggcagattatgat

SEQ ID NO: 3089 - DNA, 18 bp, synthetic construct
  misc_feature 1..18: note = Synthetic polynucleotide encoding artificial human antibody CDR-L1 region
  source 1..18: mol_type = other DNA
cagagtgttagcagctcc

SEQ ID NO: 3090 - DNA, 21 bp, synthetic construct
  misc_feature 1..21: note = Synthetic polynucleotide encoding artificial human antibody CDR-L1 region
  source 1..21: mol_type = other DNA
cagagttttgacggcaagtcc

SEQ ID NO: 3091 - DNA, 36 bp, synthetic construct
  misc_feature 1..36: note = Synthetic polynucleotide encoding artificial human antibody CDR-L1 region
  source 1..36: mol_type = other DNA
cagagtattttatacagctccaacaataaggactcc

SEQ ID NO: 3092 - DNA, 21 bp, synthetic construct
  misc_feature 1..21: note = Synthetic polynucleotide encoding artificial human antibody CDR-L1 region
  source 1..21: mol_type = other DNA
cagagtgttagcggcagccac

SEQ ID NO: 3093 - DNA, 27 bp, synthetic construct
  misc_feature 1..27: note = Synthetic polynucleotide encoding artificial human antibody CDR-L1 region
  source 1..27: mol_type = other DNA
agcagtgacgttggtggttataactat

SEQ ID NO: 3094 - DNA, 18 bp, synthetic construct
  misc_feature 1..18: note = Synthetic polynucleotide encoding artificial human antibody CDR-L1 region
  source 1..18: mol_type = other DNA
gcattgccaaaaaaatat

SEQ ID NO: 3095 - DNA, 18 bp, synthetic construct
  misc_feature 1..18: note = Synthetic polynucleotide encoding artificial human antibody CDR-L1 region
  source 1..18: mol_type = other DNA
cagagtgttagcagcaac

SEQ ID NO: 3096 - DNA, 21 bp, synthetic construct
  misc_feature 1..21: note = Synthetic polynucleotide encoding artificial human antibody CDR-L1 region
  source 1..21: mol_type = other DNA
cagagtgttagcagcagctac

SEQ ID NO: 3097 - DNA, 27 bp, synthetic construct
  misc_feature 1..27: note = Synthetic polynucleotide encoding artificial human antibody CDR-L1 region
  source 1..27: mol_type = other DNA
agcagtgacgttggtctttataacttt

SEQ ID NO: 3098 - DNA, 27 bp, synthetic construct
  misc_feature 1..27: note = Synthetic polynucleotide encoding artificial human antibody CDR-L1 region
  source 1..27: mol_type = other DNA
aactccaacatcggggcaggttattat

SEQ ID NO: 3099 - DNA, 21 bp, synthetic construct
  misc_feature 1..21: note = Synthetic polynucleotide encoding artificial human antibody CDR-L1 region
  source 1..21: mol_type = other DNA
cagagtgttaccagcagctac

SEQ ID NO: 3100 - DNA, 24 bp, synthetic construct
  misc_feature 1..24: note = Synthetic polynucleotide encoding artificial human antibody CDR-L1 region
  source 1..24: mol_type = other DNA
agctccaacatcggagataatttt

SEQ ID NO: 3101 - DNA, 18 bp, synthetic construct
  misc_feature 1..18: note = Synthetic polynucleotide encoding artificial human antibody CDR-L1 region
  source 1..18: mol_type = other DNA
caagacattgacgatgat

SEQ ID NO: 3102 - DNA, 18 bp, synthetic construct
  misc_feature 1..18: note = Synthetic polynucleotide encoding artificial human antibody CDR-L1 region
  source 1..18: mol_type = other DNA
cagagtgttggtagctgg

SEQ ID NO: 3103 - DNA, 18 bp, synthetic construct
  misc_feature 1..18: note = Synthetic polynucleotide encoding artificial human antibody CDR-L1 region
  source 1..18: mol_type = other DNA
caggacattagcagtttt

SEQ ID NO: 3104 - DNA, 18 bp, synthetic construct
  misc_feature 1..18: note = Synthetic polynucleotide encoding artificial human antibody CDR-L1 region
  source 1..18: mol_type = other DNA
agcctcagagactattct

SEQ ID NO: 3105 - DNA, 18 bp, synthetic construct
  misc_feature 1..18: note = Synthetic polynucleotide encoding artificial human antibody CDR-L1 region
  source 1..18: mol_type = other DNA
cagagtgttagcgcctac

SEQ ID NO: 3106 - DNA, 18 bp, synthetic construct
  misc_feature 1..18: note = Synthetic polynucleotide encoding artificial human antibody CDR-L1 region
  source 1..18: mol_type = other DNA
aacattggaagtaaaagt

SEQ ID NO: 3107 - DNA, 27 bp, synthetic construct
  misc_feature 1..27: note = Synthetic polynucleotide encoding artificial human antibody CDR-L1 region
  source 1..27: mol_type = other DNA
agcagtgatgttggaaattataacctt

SEQ ID NO: 3108 - DNA, 18 bp, synthetic construct
  misc_feature 1..18: note = Synthetic polynucleotide encoding artificial human antibody CDR-L1 region
  source 1..18: mol_type = other DNA
cagagtgtcagaagccac

SEQ ID NO: 3109 - DNA, 18 bp, synthetic construct
  misc_feature 1..18: note = Synthetic polynucleotide encoding artificial human antibody CDR-L1 region
  source 1..18: mol_type = other DNA
agcctcagaagttattat

SEQ ID NO: 3110 - DNA, 21 bp, synthetic construct
  misc_feature 1..21: note = Synthetic polynucleotide encoding artificial human antibody CDR-L1 region
  source 1..21: mol_type = other DNA
caggctattgtcagcaattac

SEQ ID NO: 3111 - DNA, 18 bp, synthetic construct
  misc_feature 1..18: note = Synthetic polynucleotide encoding artificial human antibody CDR-L1 region
  source 1..18: mol_type = other DNA
aacattggaaagaaagat

SEQ ID NO: 3112 - DNA, 18 bp, synthetic construct
  misc_feature 1..18: note = Synthetic polynucleotide encoding artificial human antibody CDR-L1 region
  source 1..18: mol_type = other DNA
aacattggaagtaaaagt

SEQ ID NO: 3113 - DNA, 18 bp, synthetic construct
  misc_feature 1..18: note = Synthetic polynucleotide encoding artificial human antibody CDR-L1 region
  source 1..18: mol_type = other DNA
gcattgccaaagcaatct

SEQ ID NO: 3114 - DNA, 18 bp, synthetic construct
  misc_feature 1..18: note = Synthetic polynucleotide encoding artificial human antibody CDR-L1 region
  source 1..18: mol_type = other DNA
gcattgccaaagcaatat

SEQ ID NO: 3115 - DNA, 18 bp, synthetic construct
  misc_feature 1..18: note = Synthetic polynucleotide encoding artificial human antibody CDR-L1 region
  source 1..18: mol_type = other DNA
gcattgccaaaaaaatat

SEQ ID NO: 3116 - DNA, 18 bp, synthetic construct
  misc_feature 1..18: note = Synthetic polynucleotide encoding artificial human antibody CDR-L1 region
  source 1..18: mol_type = other DNA
cagaccattgacacctat

SEQ ID NO: 3117 - DNA, 18 bp, synthetic construct
  misc_feature 1..18: note = Synthetic polynucleotide encoding artificial human antibody CDR-L1 region
  source 1..18: mol_type = other DNA
cagggcattaccaactat

SEQ ID NO: 3118 - DNA, 18 bp, synthetic construct
  misc_feature 1..18: note = Synthetic polynucleotide encoding artificial human antibody CDR-L1 region
  source 1..18: mol_type = other DNA
caggacattagcacgttt

SEQ ID NO: 3119 - DNA, 27 bp, synthetic construct
  misc_feature 1..27: note = Synthetic polynucleotide encoding artificial human antibody CDR-L1 region
  source 1..27: mol_type = other DNA
agcagtgatattggtggttataactat

SEQ ID NO: 3120 - DNA, 18 bp, synthetic construct
  misc_feature 1..18: note = Synthetic polynucleotide encoding artificial human antibody CDR-L1 region
  source 1..18: mol_type = other DNA
aaattgggggataaatat

SEQ ID NO: 3121 - DNA, 24 bp, synthetic construct
  misc_feature 1..24: note = Synthetic polynucleotide encoding artificial human antibody CDR-L1 region
  source 1..24: mol_type = other DNA
acctccaacattggaaataatttt

SEQ ID NO: 3122 - DNA, 21 bp, synthetic construct
  misc_feature 1..21: note = Synthetic polynucleotide encoding artificial human antibody CDR-L1 region
  source 1..21: mol_type = other DNA
cagagtatcagcagcacctac

SEQ ID NO: 3123 - DNA, 21 bp, synthetic construct
  misc_feature 1..21: note = Synthetic polynucleotide encoding artificial human antibody CDR-L1 region
  source 1..21: mol_type = other DNA
cagagtgttagcagcagctac

SEQ ID NO: 3124 - DNA, 27 bp, synthetic construct
  misc_feature 1..27: note = Synthetic polynucleotide encoding artificial human antibody CDR-L1 region
  source 1..27: mol_type = other DNA
agcagtgacgttggcgattataactat

SEQ ID NO: 3125 - DNA, 18 bp, synthetic construct
  misc_feature 1..18: note = Synthetic polynucleotide encoding artificial human antibody CDR-L1 region
  source 1..18: mol_type = other DNA
cagttcattagcgtctat

SEQ ID NO: 3126 - DNA, 18 bp, synthetic construct
  misc_feature 1..18: note = Synthetic polynucleotide encoding artificial human antibody CDR-L1 region
  source 1..18: mol_type = other DNA
cagagtgttagcagcaag

SEQ ID NO: 3127 - DNA, 18 bp, synthetic construct
  misc_feature 1..18: note = Synthetic polynucleotide encoding artificial human antibody CDR-L1 region
  source 1..18: mol_type = other DNA
gtattggcaaaaaattat

SEQ ID NO: 3128 - DNA, 27 bp, synthetic construct
  misc_feature 1..27: note = Synthetic polynucleotide encoding artificial human antibody CDR-L1 region
  source 1..27: mol_type = other DNA
agcagtgacgttggtgcttatccgtat

SEQ ID NO: 3129 - DNA, 21 bp, synthetic construct
  misc_feature 1..21: note = Synthetic polynucleotide encoding artificial human antibody CDR-L1 region
  source 1..21: mol_type = other DNA
cagagtttaagcagcggttac

SEQ ID NO: 3130 - DNA, 36 bp, synthetic construct
  misc_feature 1..36: note = Synthetic polynucleotide encoding artificial human antibody CDR-L1 region
  source 1..36: mol_type = other DNA
cagagtcttttatacaggtccaacgataagaactac

SEQ ID NO: 3131 - DNA, 27 bp, synthetic construct
  misc_feature 1..27: note = Synthetic polynucleotide encoding artificial human antibody CDR-L1 region
  source 1..27: mol_type = other DNA
ggctccaatatcggggctggttatgat

SEQ ID NO: 3132 - DNA, 27 bp, synthetic construct
  misc_feature 1..27: note = Synthetic polynucleotide encoding artificial human antibody CDR-L1 region
  source 1..27: mol_type = other DNA
agcagtgacgttggtggttatgaccat

SEQ ID NO: 3133 - DNA, 18 bp, synthetic construct
  misc_feature 1..18: note = Synthetic polynucleotide encoding artificial human antibody CDR-L1 region
  source 1..18: mol_type = other DNA
cagagtattagtagctgg

SEQ ID NO: 3134 - DNA, 18 bp, synthetic construct
  misc_feature 1..18: note = Synthetic polynucleotide encoding artificial human antibody CDR-L1 region
  source 1..18: mol_type = other DNA
cagagtattgtcaccaac

SEQ ID NO: 3135 - DNA, 21 bp, synthetic construct
  misc_feature 1..21: note = Synthetic polynucleotide encoding artificial human antibody CDR-L1 region
  source 1..21: mol_type = other DNA
agtgggcacagcacctacgcc

SEQ ID NO: 3136 - DNA, 21 bp, synthetic construct
  misc_feature 1..21: note = Synthetic polynucleotide encoding artificial human antibody CDR-L1 region
  source 1..21: mol_type = other DNA
cagagtgttagcagcagctac

SEQ ID NO: 3137 - DNA, 27 bp, synthetic construct
  misc_feature 1..27: note = Synthetic polynucleotide encoding artificial human antibody CDR-L1 region
  source 1..27: mol_type = other DNA
agctccaacctcggggcaggttatgct

SEQ ID NO: 3138 - DNA, 27 bp, synthetic construct
  misc_feature 1..27: note = Synthetic polynucleotide encoding artificial human antibody CDR-L1 region
  source 1..27: mol_type = other DNA
agcaccaacatcgggacaatttatgat

SEQ ID NO: 3139 - DNA, 33 bp, synthetic construct
  misc_feature 1..33: note = Synthetic polynucleotide encoding artificial human antibody CDR-L1 region
  source 1..33: mol_type = other DNA
cagagcctcctttctagtaatggacatcatctt

SEQ ID NO: 3140 - DNA, 18 bp, synthetic construct
  misc_feature 1..18: note = Synthetic polynucleotide encoding artificial human antibody CDR-L1 region
  source 1..18: mol_type = other DNA
cagggcattagcagttat

SEQ ID NO: 3141 - DNA, 24 bp, synthetic construct
  misc_feature 1..24: note = Synthetic polynucleotide encoding artificial human antibody CDR-L1 region
  source 1..24: mol_type = other DNA
aactccaacatcggaagtactttt

SEQ ID NO: 3142 - DNA, 33 bp, synthetic construct
  misc_feature 1..33: note = Synthetic polynucleotide encoding artificial human antibody CDR-L1 region
  source 1..33: mol_type = other DNA
cagagcctcctgcatagtaatggagtctactac

SEQ ID NO: 3143 - DNA, 18 bp, synthetic construct
  misc_feature 1..18: note = Synthetic polynucleotide encoding artificial human antibody CDR-L1 region
  source 1..18: mol_type = other DNA
agcctcagaagctatttt

SEQ ID NO: 3144 - DNA, 18 bp, synthetic construct
  misc_feature 1..18: note = Synthetic polynucleotide encoding artificial human antibody CDR-L1 region
  source 1..18: mol_type = other DNA
cagagtataagtagttgg

SEQ ID NO: 3145 - DNA, 36 bp, synthetic construct
  misc_feature 1..36: note = Synthetic polynucleotide encoding artificial human antibody CDR-L1 region
  source 1..36: mol_type = other DNA
cagactgttttatacgactccaacaataaaaactac

SEQ ID NO: 3146 - DNA, 24 bp, synthetic construct
  misc_feature 1..24: note = Synthetic polynucleotide encoding artificial human antibody CDR-L1 region
  source 1..24: mol_type = other DNA
agcagcaacatcggaggtaagtat

SEQ ID NO: 3147 - DNA, 18 bp, synthetic construct
  misc_feature 1..18: note = Synthetic polynucleotide encoding artificial human antibody CDR-L1 region
  source 1..18: mol_type = other DNA
cagagtattagtgactgg

SEQ ID NO: 3148 - DNA, 18 bp, synthetic construct
  misc_feature 1..18: note = Synthetic polynucleotide encoding artificial human antibody CDR-L1 region
  source 1..18: mol_type = other DNA
aaccctggaattaagagt

SEQ ID NO: 3149 - DNA, 27 bp, synthetic construct
  misc_feature 1..27: note = Synthetic polynucleotide encoding artificial human antibody CDR-L1 region
  source 1..27: mol_type = other DNA
acctccaacatcggggcagattatgat

SEQ ID NO: 3150 - DNA, 18 bp, synthetic construct
  misc_feature 1..18: note = Synthetic polynucleotide encoding artificial human antibody CDR-L1 region
  source 1..18: mol_type = other DNA
agcctcagaagcttttat

SEQ ID NO: 3151 - DNA, 27 bp, synthetic construct
  misc_feature 1..27: note = Synthetic polynucleotide encoding artificial human antibody CDR-L1 region
  source 1..27: mol_type = other DNA
agcagtgacgttgatggttataattat

SEQ ID NO: 3152 - DNA, 36 bp, synthetic construct
  misc_feature 1..36: note = Synthetic polynucleotide encoding artificial human antibody CDR-L1 region
  source 1..36: mol_type = other DNA
cagagtgttttatacagctccgacaataagaactac

SEQ ID NO: 3153 - DNA, 27 bp, synthetic construct
  misc_feature 1..27: note = Synthetic polynucleotide encoding artificial human antibody CDR-L1 region
  source 1..27: mol_type = other DNA
agcagtgacgttggtggttataactat

SEQ ID NO: 3154 - DNA, 18 bp, synthetic construct
  misc_feature 1..18: note = Synthetic polynucleotide encoding artificial human antibody CDR-L1 region
  source 1..18: mol_type = other DNA
caggacattagcaactat

SEQ ID NO: 3155 - DNA, 18 bp, synthetic construct
  misc_feature 1..18: note = Synthetic polynucleotide encoding artificial human antibody CDR-L1 region
  source 1..18: mol_type = other DNA
aacattggaagtaaaagt

SEQ ID NO: 3156 - DNA, 21 bp, synthetic construct
  misc_feature 1..21: note = Synthetic polynucleotide encoding artificial human antibody CDR-L1 region
  source 1..21: mol_type = other DNA
cagagtgtaagaggcaattat

SEQ ID NO: 3157 - DNA, 24 bp, synthetic construct
  misc_feature 1..24: note = Synthetic polynucleotide encoding artificial human antibody CDR-L1 region
  source 1..24: mol_type = other DNA
agctccaacattgggagtaattat

SEQ ID NO: 3158 - DNA, 18 bp, synthetic construct
  misc_feature 1..18: note = Synthetic polynucleotide encoding artificial human antibody CDR-L1 region
  source 1..18: mol_type = other DNA
aacattggaagttacaat

SEQ ID NO: 3159 - DNA, 21 bp, synthetic construct
  misc_feature 1..21: note = Synthetic polynucleotide encoding artificial human antibody CDR-L1 region
  source 1..21: mol_type = other DNA
cagagggttagcagcaactac

SEQ ID NO: 3160 - DNA, 27 bp, synthetic construct
  misc_feature 1..27: note = Synthetic polynucleotide encoding artificial human antibody CDR-L1 region
  source 1..27: mol_type = other DNA
agcagtgatgttgggagttataacctt

SEQ ID NO: 3161 - DNA, 33 bp, synthetic construct; identical to SEQ ID NO: 3014
  misc_feature 1..33: note = Synthetic polynucleotide encoding artificial human antibody CDR-L1 region
  source 1..33: mol_type = other DNA

SEQ ID NO: 3162 - DNA, 24 bp, synthetic construct
  misc_feature 1..24: note = Synthetic polynucleotide encoding artificial human antibody CDR-L1 region
  source 1..24: mol_type = other DNA
agctccaacatcggaagtaattat

SEQ ID NO: 3163 - DNA, 18 bp, synthetic construct
  misc_feature 1..18: note = Synthetic polynucleotide encoding artificial human antibody CDR-L1 region
  source 1..18: mol_type = other DNA
agcctcagaagctattat

SEQ ID NO: 3164 - DNA, 18 bp, synthetic construct
  misc_feature 1..18: note = Synthetic polynucleotide encoding artificial human antibody CDR-L1 region
  source 1..18: mol_type = other DNA
cagagcattagcagctat

SEQ ID NO: 3165 - DNA, 18 bp, synthetic construct
  misc_feature 1..18: note = Synthetic polynucleotide encoding artificial human antibody CDR-L1 region
  source 1..18: mol_type = other DNA
aacattggatatagaaat

SEQ ID NO: 3166 - DNA, 18 bp, synthetic construct
  misc_feature 1..18: note = Synthetic polynucleotide encoding artificial human antibody CDR-L1 region
  source 1..18: mol_type = other DNA
cagggcattagaaatgat

SEQ ID NO: 3167 - DNA, 18 bp, synthetic construct
  misc_feature 1..18: note = Synthetic polynucleotide encoding artificial human antibody CDR-L1 region
  source 1..18: mol_type = other DNA
cagagtattagtagctgg

SEQ ID NO: 3168 - DNA, 33 bp, synthetic construct
  misc_feature 1..33: note = Synthetic polynucleotide encoding artificial human antibody CDR-L1 region
  source 1..33: mol_type = other DNA
cagagcctccttcatagtaatggattcaactat

SEQ ID NO: 3169 - DNA, 18 bp, synthetic construct
  misc_feature 1..18: note = Synthetic polynucleotide encoding artificial human antibody CDR-L1 region
  source 1..18: mol_type = other DNA
aaattgggggataaatat

SEQ ID NO: 3170 - DNA, 18 bp, synthetic construct
  misc_feature 1..18: note = Synthetic polynucleotide encoding artificial human antibody CDR-L1 region
  source 1..18: mol_type = other DNA
gcattgccaaaaaaatat

SEQ ID NO: 3171 - DNA, 18 bp, synthetic construct
  misc_feature 1..18: note = Synthetic polynucleotide encoding artificial human antibody CDR-L1 region
  source 1..18: mol_type = other DNA
agcctcagaagctattat

SEQ ID NO: 3172 - DNA, 36 bp, synthetic construct
  misc_feature 1..36: note = Synthetic polynucleotide encoding artificial human antibody CDR-L1 region
  source 1..36: mol_type = other DNA
cagagtgttttatacagctccagcagtaagaactac

SEQ ID NO: 3173 - DNA, 33 bp, synthetic construct
  misc_feature 1..33: note = Synthetic polynucleotide encoding artificial human antibody CDR-L1 region
  source 1..33: mol_type = other DNA
cagagcctcctgcatagcaatggatacaactat

SEQ ID NO: 3174 - DNA, 27 bp, synthetic construct
  misc_feature 1..27: note = Synthetic polynucleotide encoding artificial human antibody CDR-L1 region
  source 1..27: mol_type = other DNA
agcagtgacgttggtggttataactat

SEQ ID NO: 3175 - DNA, 36 bp, synthetic construct
  misc_feature 1..36: note = Synthetic polynucleotide encoding artificial human antibody CDR-L1 region
  source 1..36: mol_type = other DNA
cagagtgttttatacagctccaacaataagaactac

SEQ ID NO: 3176 - DNA, 27 bp, synthetic construct
  misc_feature 1..27: note = Synthetic polynucleotide encoding artificial human antibody CDR-L1 region
  source 1..27: mol_type = other DNA
agcagtgatgttgggagttataacctt

SEQ ID NO: 3177 - DNA, 18 bp, synthetic construct
  misc_feature 1..18: note = Synthetic polynucleotide encoding artificial human antibody CDR-L1 region
  source 1..18: mol_type = other DNA
gctttgccaaaaaaatat

SEQ ID NO: 3178 - DNA, 18 bp, synthetic construct
  misc_feature 1..18: note = Synthetic polynucleotide encoding artificial human antibody CDR-L1 region
  source 1..18: mol_type = other DNA
cagagtgttagcagcaac

SEQ ID NO: 3179 - DNA, 21 bp, synthetic construct
  misc_feature 1..21: note = Synthetic polynucleotide encoding artificial human antibody CDR-L1 region
  source 1..21: mol_type = other DNA
cagagtgttagcagcagctac

SEQ ID NO: 3180 - DNA, 18 bp, synthetic construct
  misc_feature 1..18: note = Synthetic polynucleotide encoding artificial human antibody CDR-L1 region
  source 1..18: mol_type = other DNA
aacattggaagtagaagt

SEQ ID NO: 3181 - DNA, 27 bp, synthetic construct
  misc_feature 1..27: note = Synthetic polynucleotide encoding artificial human antibody CDR-L1 region
  source 1..27: mol_type = other DNA
agcagtgatattgggacttataacctt

SEQ ID NO: 3182 - DNA, 36 bp, synthetic construct
  misc_feature 1..36: note = Synthetic polynucleotide encoding artificial human antibody CDR-L1 region
  source 1..36: mol_type = other DNA
cagagtgttttatccacctccaacaataagaactac

SEQ ID NO: 3183 - DNA, 18 bp, synthetic construct
  misc_feature 1..18: note = Synthetic polynucleotide encoding artificial human antibody CDR-L1 region
  source 1..18: mol_type = other DNA
aacattggaagtaaaagt

SEQ ID NO: 3184 - DNA, 18 bp, synthetic construct
  misc_feature 1..18: note = Synthetic polynucleotide encoding artificial human antibody CDR-L1 region
  source 1..18: mol_type = other DNA
cagcacattgccgggcgt

SEQ ID NO: 3185 - DNA, 24 bp, synthetic construct
  misc_feature 1..24: note = Synthetic polynucleotide encoding artificial human antibody CDR-L1 region
  source 1..24: mol_type = other DNA
agctccaacatcggaagtaatact

SEQ ID NO: 3186 - DNA, 24 bp, synthetic construct
  misc_feature 1..24: note = Synthetic polynucleotide encoding artificial human antibody CDR-L1 region
  source 1..24: mol_type = other DNA
agtggcagcattgccagcaactat

SEQ ID NO: 3187 - DNA, 27 bp, synthetic construct
  misc_feature 1..27: note = Synthetic polynucleotide encoding artificial human antibody CDR-L1 region
  source 1..27: mol_type = other DNA
agctccaacatcggggcacattatgat

SEQ ID NO: 3188 - DNA, 18 bp, synthetic construct
  misc_feature 1..18: note = Synthetic polynucleotide encoding artificial human antibody CDR-L1 region
  source 1..18: mol_type = other DNA
cagagcattagtagttat

SEQ ID NO: 3189 - DNA, 18 bp, synthetic construct
  misc_feature 1..18: note = Synthetic polynucleotide encoding artificial human antibody CDR-L1 region
  source 1..18: mol_type = other DNA
caggacattagcaactat

SEQ ID NO: 3190 - DNA, 21 bp, synthetic construct
  misc_feature 1..21: note = Synthetic polynucleotide encoding artificial human antibody CDR-L1 region
  source 1..21: mol_type = other DNA
caagatgttgccagcacctac

SEQ ID NO: 3191 - DNA, 27 bp, synthetic construct
  misc_feature 1..27: note = Synthetic polynucleotide encoding artificial human antibody CDR-L1 region
  source 1..27: mol_type = other DNA
accagtgatgttgggacttataacctt

SEQ ID NO: 3192 - DNA, 21 bp, synthetic construct
  misc_feature 1..21: note = Synthetic polynucleotide encoding artificial human antibody CDR-L1 region
  source 1..21: mol_type = other DNA
cagagtgttgccaacaactac

SEQ ID NO: 3193 - DNA, 21 bp, synthetic construct
  misc_feature 1..21: note = Synthetic polynucleotide encoding artificial human antibody CDR-L1 region
  source 1..21: mol_type = other DNA
cagagtgttagcagcaactac

SEQ ID NO: 3194 - DNA, 27 bp, synthetic construct
  misc_feature 1..27: note = Synthetic polynucleotide encoding artificial human antibody CDR-L1 region
  source 1..27: mol_type = other DNA
tctggttcagtctccactagtttctac

SEQ ID NO: 3195 - DNA, 27 bp, synthetic construct
  misc_feature 1..27: note = Synthetic polynucleotide encoding artificial human antibody CDR-L1 region
  source 1..27: mol_type = other DNA
agctccaacatcggggcacaatatgat

SEQ ID NO: 3196 - DNA, 27 bp, synthetic construct
  misc_feature 1..27: note = Synthetic polynucleotide encoding artificial human antibody CDR-L1 region
  source 1..27: mol_type = other DNA
agctccaacatcggggcaggttacgat

SEQ ID NO: 3197 - DNA, 21 bp, synthetic construct
  misc_feature 1..21: note = Synthetic polynucleotide encoding artificial human antibody CDR-L1 region
  source 1..21: mol_type = other DNA
cagagtgttagcagcagttac

SEQ ID NO: 3198 - DNA, 27 bp, synthetic construct
  misc_feature 1..27: note = Synthetic polynucleotide encoding artificial human antibody CDR-L1 region
  source 1..27: mol_type = other DNA
agcagtgacgttggtggttataactat

SEQ ID NO: 3199 - DNA, 27 bp, synthetic construct
  misc_feature 1..27: note = Synthetic polynucleotide encoding artificial human antibody CDR-L1 region
  source 1..27: mol_type = other DNA
agcagtgatattgggggttatgacctt

SEQ ID NO: 3200 - DNA, 36 bp, synthetic construct; identical to SEQ ID NO: 3175
  misc_feature 1..36: note = Synthetic polynucleotide encoding artificial human antibody CDR-L1 region
  source 1..36: mol_type = other DNA

SEQ ID NO: 3201 - DNA, 24 bp, synthetic construct
  misc_feature 1..24: note = Synthetic polynucleotide encoding artificial human antibody CDR-L1 region
  source 1..24: mol_type = other DNA
agctccaacatcggaagtaatact

SEQ ID NO: 3202 - DNA, 27 bp, synthetic construct
  misc_feature 1..27: note = Synthetic polynucleotide encoding artificial human antibody CDR-L1 region
  source 1..27: mol_type = other DNA
actggagtagtcaccactggtcattat

SEQ ID NO: 3203 - DNA, 27 bp, synthetic construct
  misc_feature 1..27: note = Synthetic polynucleotide encoding artificial human antibody CDR-L1 region
  source 1..27: mol_type = other DNA
tactccaacatcggggcaggttatgat

SEQ ID NO: 3204 - DNA, 18 bp, synthetic construct
  misc_feature 1..18: note = Synthetic polynucleotide encoding artificial human antibody CDR-L1 region
  source 1..18: mol_type = other DNA
cagaatattaacaggttc

SEQ ID NO: 3205 - DNA, 18 bp, synthetic construct
  misc_feature 1..18: note = Synthetic polynucleotide encoding artificial human antibody CDR-L1 region
  source 1..18: mol_type = other DNA
cagggcattagaaatgat

SEQ ID NO: 3206 - DNA, 18 bp, synthetic construct
  misc_feature 1..18: note = Synthetic polynucleotide encoding artificial human antibody CDR-L1 region
  source 1..18: mol_type = other DNA
agcctcagaacggattat

SEQ ID NO: 3207 - DNA, 36 bp, synthetic construct
  misc_feature 1..36: note = Synthetic polynucleotide encoding artificial human antibody CDR-L1 region
  source 1..36: mol_type = other DNA
cagagtgttttatccagctacaacaataaggactac

SEQ ID NO: 3208 - DNA, 33 bp, synthetic construct; identical to SEQ ID NO: 3014
  misc_feature 1..33: note = Synthetic polynucleotide encoding artificial human antibody CDR-L1 region
  source 1..33: mol_type = other DNA

SEQ ID NO: 3209 - DNA, 18 bp, synthetic construct
  misc_feature 1..18: note = Synthetic polynucleotide encoding artificial human antibody CDR-L1 region
  source 1..18: mol_type = other DNA
gcattgccaaaaaaatat

SEQ ID NO: 3210 - DNA, 18 bp, synthetic construct
  misc_feature 1..18: note = Synthetic polynucleotide encoding artificial human antibody CDR-L1 region
  source 1..18: mol_type = other DNA
aacattggaagtaaaagt

SEQ ID NO: 3211 - DNA, 18 bp, synthetic construct
  misc_feature 1..18: note = Synthetic polynucleotide encoding artificial human antibody CDR-L1 region
  source 1..18: mol_type = other DNA
cagagcattagcacctat

SEQ ID NO: 3212 - DNA, 18 bp, synthetic construct
  misc_feature 1..18: note = Synthetic polynucleotide encoding artificial human antibody CDR-L1 region
  source 1..18: mol_type = other DNA
cagagtgttggcagcgac

SEQ ID NO: 3213 - DNA, 36 bp, synthetic construct; identical to SEQ ID NO: 3175
  misc_feature 1..36: note = Synthetic polynucleotide encoding artificial human antibody CDR-L1 region
  source 1..36: mol_type = other DNA

SEQ ID NO: 3214 - DNA, 18 bp, synthetic construct
  misc_feature 1..18: note = Synthetic polynucleotide encoding artificial human antibody CDR-L1 region
  source 1..18: mol_type = other DNA
gcattggcaaaggaatat

SEQ ID NO: 3215 - DNA, 18 bp, synthetic construct
  misc_feature 1..18: note = Synthetic polynucleotide encoding artificial human antibody CDR-L1 region
  source 1..18: mol_type = other DNA
cagaatattcgcgacttc

SEQ ID NO: 3216 - DNA, 36 bp, synthetic construct
  misc_feature 1..36: note = Synthetic polynucleotide encoding artificial human antibody CDR-L1 region
  source 1..36: mol_type = other DNA
cagactattttatacagctccaacaataagaactat

SEQ ID NO: 3217 - DNA, 18 bp, synthetic construct
  misc_feature 1..18: note = Synthetic polynucleotide encoding artificial human antibody CDR-L1 region
  source 1..18: mol_type = other DNA
aaattggggaataaatat

SEQ ID NO: 3218 - DNA, 24 bp, synthetic construct
  misc_feature 1..24: note = Synthetic polynucleotide encoding artificial human antibody CDR-L1 region
  source 1..24: mol_type = other DNA
aggtccaacatcgggagtaatttt

SEQ ID NO: 3219 - DNA, 24 bp, synthetic construct
  misc_feature 1..24: note = Synthetic polynucleotide encoding artificial human antibody CDR-L1 region
  source 1..24: mol_type = other DNA
agctccaacattgggaataactat

SEQ ID NO: 3220 - DNA, 18 bp, synthetic construct
  misc_feature 1..18: note = Synthetic polynucleotide encoding artificial human antibody CDR-L1 region
  source 1..18: mol_type = other DNA
cagagtgttagtttctgg

SEQ ID NO: 3221 - DNA, 36 bp, synthetic construct
  misc_feature 1..36: note = Synthetic polynucleotide encoding artificial human antibody CDR-L1 region
  source 1..36: mol_type = other DNA
cagagtgtcttctacagctccaacaataagaactac

SEQ ID NO: 3222 - DNA, 36 bp, synthetic construct; identical to SEQ ID NO: 3175
  misc_feature 1..36: note = Synthetic polynucleotide encoding artificial human antibody CDR-L1 region
  source 1..36: mol_type = other DNA

SEQ ID NO: 3223 - DNA, 27 bp, synthetic construct
  misc_feature 1..27: note = Synthetic polynucleotide encoding artificial human antibody CDR-L1 region
  source 1..27: mol_type = other DNA
agcaatgacattggtcgttataagtat

SEQ ID NO: 3224 - DNA, 33 bp, synthetic construct; identical to SEQ ID NO: 3014
  misc_feature 1..33: note = Synthetic polynucleotide encoding artificial human antibody CDR-L1 region
  source 1..33: mol_type = other DNA

SEQ ID NO: 3225 - DNA, 18 bp, synthetic construct
  misc_feature 1..18: note = Synthetic polynucleotide encoding artificial human antibody CDR-L1 region
  source 1..18: mol_type = other DNA
aaattgggggataaatat

SEQ ID NO: 3226 - DNA, 21 bp, synthetic construct
  misc_feature 1..21: note = Synthetic polynucleotide encoding artificial human antibody CDR-L1 region
  source 1..21: mol_type = other DNA
cagagggttaacagcaactac

SEQ ID NO: 3227 - DNA, 18 bp, synthetic construct
  misc_feature 1..18: note = Synthetic polynucleotide encoding artificial human antibody CDR-L1 region
  source 1..18: mol_type = other DNA
aatttgggaaataaatat

SEQ ID NO: 3228 - DNA, 33 bp, synthetic construct; identical to SEQ ID NO: 3035
  misc_feature 1..33: note = Synthetic polynucleotide encoding artificial human antibody CDR-L1 region
  source 1..33: mol_type = other DNA

SEQ ID NO: 3229 - DNA, 24 bp, synthetic construct
  misc_feature 1..24: note = Synthetic polynucleotide encoding artificial human antibody CDR-L1 region
  source 1..24: mol_type = other DNA
agctccaacattgggaataattat

SEQ ID NO: 3230 - DNA, 18 bp, synthetic construct
  misc_feature 1..18: note = Synthetic polynucleotide encoding artificial human antibody CDR-L1 region
  source 1..18: mol_type = other DNA
cagagtattagtagctgg

SEQ ID NO: 3231 - DNA, 18 bp, synthetic construct
  misc_feature 1..18: note = Synthetic polynucleotide encoding artificial human antibody CDR-L1 region
  source 1..18: mol_type = other DNA
cagagtattagtagctgg

SEQ ID NO: 3232 - DNA, 27 bp, synthetic construct
  misc_feature 1..27: note = Synthetic polynucleotide encoding artificial human antibody CDR-L1 region
  source 1..27: mol_type = other DNA
agctccaacatcggggcaggttatgat

SEQ ID NO: 3233 - DNA, 18 bp, synthetic construct
  misc_feature 1..18: note = Synthetic polynucleotide encoding artificial human antibody CDR-L1 region
  source 1..18: mol_type = other DNA
gcattgccaaagcaatat

SEQ ID NO: 3234 - DNA, 18 bp, synthetic construct
  misc_feature 1..18: note = Synthetic polynucleotide encoding artificial human antibody CDR-L1 region
  source 1..18: mol_type = other DNA
cagaatattcgcaacaat

SEQ ID NO: 3235 - DNA, 18 bp, synthetic construct
  misc_feature 1..18: note = Synthetic polynucleotide encoding artificial human antibody CDR-L1 region
  source 1..18: mol_type = other DNA
cagagtgttagcagcaac

SEQ ID NO: 3236 - DNA, 18 bp, synthetic construct
  misc_feature 1..18: note = Synthetic polynucleotide encoding artificial human antibody CDR-L1 region
  source 1..18: mol_type = other DNA
cagagcattagcagctat

SEQ ID NO: 3237 - DNA, 18 bp, synthetic construct
  misc_feature 1..18: note = Synthetic polynucleotide encoding artificial human antibody CDR-L1 region
  source 1..18: mol_type = other DNA
cagagcattagcacctat

SEQ ID NO: 3238 - DNA, 21 bp, synthetic construct
  misc_feature 1..21: note = Synthetic polynucleotide encoding artificial human antibody CDR-L1 region
  source 1..21: mol_type = other DNA
cagagtgttaccagcagctac

SEQ ID NO: 3239 - DNA, 18 bp, synthetic construct
  misc_feature 1..18: note = Synthetic polynucleotide encoding artificial human antibody CDR-L1 region
  source 1..18: mol_type = other DNA
aacattggaagtaaaagt

SEQ ID NO: 3240 - DNA, 24 bp, synthetic construct
  misc_feature 1..24: note = Synthetic polynucleotide encoding artificial human antibody CDR-L1 region
  source 1..24: mol_type = other DNA
agtggcagcattgccgacaagtat

SEQ ID NO: 3241 - DNA, 33 bp, synthetic construct
  misc_feature 1..33: note = Synthetic polynucleotide encoding artificial human antibody CDR-L1 region
  source 1..33: mol_type = other DNA
cagagcctcctacatagtaatggatacaactat

SEQ ID NO: 3242 - DNA, 18 bp, synthetic construct
  misc_feature 1..18: note = Synthetic polynucleotide encoding artificial human antibody CDR-L1 region
  source 1..18: mol_type = other DNA
cagagtattagtagctgg

SEQ ID NO: 3243 - DNA, 33 bp, synthetic construct
  misc_feature 1..33: note = Synthetic polynucleotide encoding artificial human antibody CDR-L1 region
  source 1..33: mol_type = other DNA
cagagcctcctgtatcgtgatggagagcactat

SEQ ID NO: 3244 - DNA, 18 bp, synthetic construct
  misc_feature 1..18: note = Synthetic polynucleotide encoding artificial human antibody CDR-L1 region
  source 1..18: mol_type = other DNA
cagagcattagtagctat

SEQ ID NO: 3245 - DNA, 36 bp, synthetic construct
  misc_feature 1..36: note = Synthetic polynucleotide encoding artificial human antibody CDR-L1 region
  source 1..36: mol_type = other DNA
cagagtcttttatacagttccaactataagaactac

SEQ ID NO: 3246 - DNA, 24 bp, synthetic construct
  misc_feature 1..24: note = Synthetic polynucleotide encoding artificial human antibody CDR-L1 region
  source 1..24: mol_type = other DNA
agctccaacatcggaagtaattat

SEQ ID NO: 3247 - DNA, 27 bp, synthetic construct
  misc_feature 1..27: note = Synthetic polynucleotide encoding artificial human antibody CDR-L1 region
  source 1..27: mol_type = other DNA
agcagtgacgttggtggttataactat

SEQ ID NO: 3248 - DNA, 27 bp, synthetic construct
  misc_feature 1..27: note = Synthetic polynucleotide encoding artificial human antibody CDR-L1 region
  source 1..27: mol_type = other DNA
aactccaacatcggggcaggttatgat

SEQ ID NO: 3249 - DNA, 27 bp, synthetic construct
  misc_feature 1..27: note = Synthetic polynucleotide encoding artificial human antibody CDR-L1 region
  source 1..27: mol_type = other DNA
agtgacatcaatgttactaactacaac

SEQ ID NO: 3250 - DNA, 33 bp, synthetic construct; identical to SEQ ID NO: 3044
  misc_feature 1..33: note = Synthetic polynucleotide encoding artificial human antibody CDR-L1 region
  source 1..33: mol_type = other DNA

SEQ ID NO: 3251 - DNA, 18 bp, synthetic construct
  misc_feature 1..18: note = Synthetic polynucleotide encoding artificial human antibody CDR-L1 region
  source 1..18: mol_type = other DNA
cagggcattagaaatgat

SEQ ID NO: 3252 - DNA, 33 bp, synthetic construct
  misc_feature 1..33: note = Synthetic polynucleotide encoding artificial human antibody CDR-L1 region
  source 1..33: mol_type = other DNA
cagagcctcctgcatagtgatggaaagacctat

SEQ ID NO: 3253 - DNA, 24 bp, synthetic construct
  misc_feature 1..24: note = Synthetic polynucleotide encoding artificial human antibody CDR-H2 region
  source 1..24: mol_type = other DNA
atgagtgggggtggtggtagtata

SEQ ID NO: 3254 - DNA, 24 bp, synthetic construct
  misc_feature 1..24: note = Synthetic polynucleotide encoding artificial human antibody CDR-H2 region
  source 1..24: mol_type = other DNA
ataaagcaagatggaagtgagaaa

SEQ ID NO: 3255 - DNA, 24 bp, synthetic construct
  misc_feature 1..24: note = Synthetic polynucleotide encoding artificial human antibody CDR-H2 region
  source 1..24: mol_type = other DNA
attagttggaacagtgggaacata

SEQ ID NO: 3256 - DNA, 21 bp, synthetic construct
  misc_feature 1..21: note = Synthetic polynucleotide encoding artificial human antibody CDR-H2 region
  source 1..21: mol_type = other DNA
atttattgggatgatgataag

SEQ ID NO: 3257 - DNA, 24 bp, synthetic construct
  misc_feature 1..24: note = Synthetic polynucleotide encoding artificial human antibody CDR-H2 region
  source 1..24: mol_type = other DNA
atcaacactagtggtggaagcaca

SEQ ID NO: 3258 - DNA, 24 bp, synthetic construct
  misc_feature 1..24: note = Synthetic polynucleotide encoding artificial human antibody CDR-H2 region
  source 1..24: mol_type = other DNA
attagttggaatagtgttagtata

SEQ ID NO: 3259 - DNA, 24 bp, synthetic construct
  misc_feature 1..24: note = Synthetic polynucleotide encoding artificial human antibody CDR-H2 region
  source 1..24: mol_type = other DNA
atcaccacttacaatcgtgacaca

SEQ ID NO: 3260 - DNA, 24 bp, synthetic construct
  misc_feature 1..24: note = Synthetic polynucleotide encoding artificial human antibody CDR-H2 region
  source 1..24: mol_type = other DNA
attagtggggatggtggtggcaca

SEQ ID NO: 3261 - DNA, 24 bp, synthetic construct
  misc_feature 1..24: note = Synthetic polynucleotide encoding artificial human antibody CDR-H2 region
  source 1..24: mol_type = other DNA
atacggtatgatggaagaaataaa

SEQ ID NO: 3262 - DNA, 24 bp, synthetic construct
  misc_feature 1..24: note = Synthetic polynucleotide encoding artificial human antibody CDR-H2 region
  source 1..24: mol_type = other DNA
attggatgggacagtggtggcatc

SEQ ID NO: 3263 - DNA, 24 bp, synthetic construct
  misc_feature 1..24: note = Synthetic polynucleotide encoding artificial human antibody CDR-H2 region
  source 1..24: mol_type = other DNA
atcagcatttacagtggtaacaca

SEQ ID NO: 3264 - DNA, 24 bp, synthetic construct
  misc_feature 1..24: note = Synthetic polynucleotide encoding artificial human antibody CDR-H2 region
  source 1..24: mol_type = other DNA
atatcatctgatggaaggaagata

SEQ ID NO: 3265 - DNA, 24 bp, synthetic construct
  misc_feature 1..24: note = Synthetic polynucleotide encoding artificial human antibody CDR-H2 region
  source 1..24: mol_type = other DNA
atcagtgctactactggtagcact

SEQ ID NO: 3266 - DNA, 27 bp, synthetic construct
  misc_feature 1..27: note = Synthetic polynucleotide encoding artificial human antibody CDR-H2 region
  source 1..27: mol_type = other DNA
acatactacaggtccaagtggtataat

SEQ ID NO: 3267 - DNA, 24 bp, synthetic construct
  misc_feature 1..24: note = Synthetic polynucleotide encoding artificial human antibody CDR-H2 region
  source 1..24: mol_type = other DNA
attcactatgatggaaggaataaa

SEQ ID NO: 3268 - DNA, 24 bp, synthetic construct
  misc_feature 1..24: note = Synthetic polynucleotide encoding artificial human antibody CDR-H2 region
  source 1..24: mol_type = other DNA
attagtagtagtagtagttccata

SEQ ID NO: 3269 - DNA, 24 bp, synthetic construct
  misc_feature 1..24: note = Synthetic polynucleotide encoding artificial human antibody CDR-H2 region
  source 1..24: mol_type = other DNA
atcagcgcttacaatggtaacacg

SEQ ID NO: 3270 - DNA, 24 bp, synthetic construct
  misc_feature 1..24: note = Synthetic polynucleotide encoding artificial human antibody CDR-H2 region
  source 1..24: mol_type = other DNA
attggtattggtggcaataccata

SEQ ID NO: 3271 - DNA, 24 bp, synthetic construct
  misc_feature 1..24: note = Synthetic polynucleotide encoding artificial human antibody CDR-H2 region
  source 1..24: mol_type = other DNA
atcaacgctggcaatggtaacaca

SEQ ID NO: 3272 - DNA, 21 bp, synthetic construct
  misc_feature 1..21: note = Synthetic polynucleotide encoding artificial human antibody CDR-H2 region
  source 1..21: mol_type = other DNA
gtctatcatagtgggaatgcc

SEQ ID NO: 3273 - DNA, 21 bp, synthetic construct
  misc_feature 1..21: note = Synthetic polynucleotide encoding artificial human antibody CDR-H2 region
  source 1..21: mol_type = other DNA
atttattgggatgatgatgag

SEQ ID NO: 3274 - DNA, 24 bp, synthetic construct
  misc_feature 1..24: note = Synthetic polynucleotide encoding artificial human antibody CDR-H2 region
  source 1..24: mol_type = other DNA
attagttggggtagttcttacata

SEQ ID NO: 3275 - DNA, 24 bp, synthetic construct
  misc_feature 1..24: note = Synthetic polynucleotide encoding artificial human antibody CDR-H2 region
  source 1..24: mol_type = other DNA
attagtagcagtagtaggtacata

SEQ ID NO: 3276 - DNA, 21 bp, synthetic construct
  misc_feature 1..21: note = Synthetic polynucleotide encoding artificial human antibody CDR-H2 region
  source 1..21: mol_type = other DNA
atctattacagtgggaacagg

SEQ ID NO: 3277 - DNA, 21 bp, synthetic construct
  misc_feature 1..21: note = Synthetic polynucleotide encoding artificial human antibody CDR-H2 region
  source 1..21: mol_type = other DNA
atctataccagtgggaatacc

SEQ ID NO: 3278 - DNA, 24 bp, synthetic construct
  misc_feature 1..24: note = Synthetic polynucleotide encoding artificial human antibody CDR-H2 region
  source 1..24: mol_type = other DNA
attagtagtaaaagtagttccaaa

SEQ ID NO: 3279 - DNA, 21 bp, synthetic construct
  misc_feature 1..21: note = Synthetic polynucleotide encoding artificial human antibody CDR-H2 region
  source 1..21: mol_type = other DNA
atctattatagagggaccacc

SEQ ID NO: 3280 - DNA, 24 bp, synthetic construct
  misc_feature 1..24: note = Synthetic polynucleotide encoding artificial human antibody CDR-H2 region
  source 1..24: mol_type = other DNA
atctggtatgatggaagtaataaa

SEQ ID NO: 3281 - DNA, 21 bp, synthetic construct
  misc_feature 1..21: note = Synthetic polynucleotide encoding artificial human antibody CDR-H2 region
  source 1..21: mol_type = other DNA
atgtacaccagtgggagcacc

SEQ ID NO: 3282 - DNA, 24 bp, synthetic construct
  misc_feature 1..24: note = Synthetic polynucleotide encoding artificial human antibody CDR-H2 region
  source 1..24: mol_type = other DNA
atcaaccctaatagtggtggcaca

SEQ ID NO: 3283 - DNA, 21 bp, synthetic construct
  misc_feature 1..21: note = Synthetic polynucleotide encoding artificial human antibody CDR-H2 region
  source 1..21: mol_type = other DNA
atccatcacactgggagcgcc

SEQ ID NO: 3284 - DNA, 21 bp, synthetic construct
  misc_feature 1..21: note = Synthetic polynucleotide encoding artificial human antibody CDR-H2 region
  source 1..21: mol_type = other DNA
atctattatagtggggacacc

SEQ ID NO: 3285 - DNA, 24 bp, synthetic construct
  misc_feature 1..24: note = Synthetic polynucleotide encoding artificial human antibody CDR-H2 region
  source 1..24: mol_type = other DNA
atatcacatgatggaagtaataaa

SEQ ID NO: 3286 - DNA, 21 bp, synthetic construct
  misc_feature 1..21: note = Synthetic polynucleotide encoding artificial human antibody CDR-H2 region
  source 1..21: mol_type = other DNA
atttattgggatgatgataag

SEQ ID NO: 3287 - DNA, 24 bp, synthetic construct
  misc_feature 1..24: note = Synthetic polynucleotide encoding artificial human antibody CDR-H2 region
  source 1..24: mol_type = other DNA
attaatactactagtgatcccata

SEQ ID NO: 3288 - DNA, 24 bp, synthetic construct
  misc_feature 1..24: note = Synthetic polynucleotide encoding artificial human antibody CDR-H2 region
  source 1..24: mol_type = other DNA
atcatccctatctttggtacagca

SEQ ID NO: 3289 - DNA, 21 bp, synthetic construct
  misc_feature 1..21: note = Synthetic polynucleotide encoding artificial human antibody CDR-H2 region
  source 1..21: mol_type = other DNA
atctatttcagtgtgaccacc

SEQ ID NO: 3290 - DNA, 21 bp, synthetic construct
  misc_feature 1..21: note = Synthetic polynucleotide encoding artificial human antibody CDR-H2 region
  source 1..21: mol_type = other DNA
ctctcttacagtgggaacacc

SEQ ID NO: 3291 - DNA, 24 bp, synthetic construct
  misc_feature 1..24: note = Synthetic polynucleotide encoding artificial human antibody CDR-H2 region
  source 1..24: mol_type = other DNA
atcaacgctggcaatggtgacata

SEQ ID NO: 3292 - DNA, 24 bp, synthetic construct
  misc_feature 1..24: note = Synthetic polynucleotide encoding artificial human antibody CDR-H2 region
  source 1..24: mol_type = other DNA
attagtggtagtggtcatagcaca

SEQ ID NO: 3293 - DNA, 24 bp, synthetic construct
  misc_feature 1..24: note = Synthetic polynucleotide encoding artificial human antibody CDR-H2 region
  source 1..24: mol_type = other DNA
attaattggaatggtggtagcaca

SEQ ID NO: 3294 - DNA, 24 bp, synthetic construct
  misc_feature 1..24: note = Synthetic polynucleotide encoding artificial human antibody CDR-H2 region
  source 1..24: mol_type = other DNA
atatcatatgatggaagtaataaa

SEQ ID NO: 3295 - DNA, 21 bp, synthetic construct
  misc_feature 1..21: note = Synthetic polynucleotide encoding artificial human antibody CDR-H2 region
  source 1..21: mol_type = other DNA
atctattacagtgggagcacc

SEQ ID NO: 3296 - DNA, 24 bp, synthetic construct
  misc_feature 1..24: note = Synthetic polynucleotide encoding artificial human antibody CDR-H2 region
  source 1..24: mol_type = other DNA
atcaaccctaacagtggtggcaca

SEQ ID NO: 3297 - DNA, 21 bp, synthetic construct
  misc_feature 1..21: note = Synthetic polynucleotide encoding artificial human antibody CDR-H2 region
  source 1..21: mol_type = other DNA
attggtactgctggtgacaca

SEQ ID NO: 3298 - DNA, 24 bp, synthetic construct
  misc_feature 1..24: note = Synthetic polynucleotide encoding artificial human antibody CDR-H2 region
  source 1..24: mol_type = other DNA
atatcatatgatggaagtaatagt

SEQ ID NO: 3299 - DNA, 24 bp, synthetic construct
  misc_feature 1..24: note = Synthetic polynucleotide encoding artificial human antibody CDR-H2 region
  source 1..24: mol_type = other DNA
atgagtagtggcggtaatcgcaga

SEQ ID NO: 3300 - DNA, 24 bp, synthetic construct
  misc_feature 1..24: note = Synthetic polynucleotide encoding artificial human antibody CDR-H2 region
  source 1..24: mol_type = other DNA
attagtagtagtggtacttacata

SEQ ID NO: 3301 - DNA, 24 bp, synthetic construct
  misc_feature 1..24: note = Synthetic polynucleotide encoding artificial human antibody CDR-H2 region
  source 1..24: mol_type = other DNA
atatcatatgatggaagcaataaa

SEQ ID NO: 3302 - DNA, 24 bp, synthetic construct
  misc_feature 1..24: note = Synthetic polynucleotide encoding artificial human antibody CDR-H2 region
  source 1..24: mol_type = other DNA
atcagttggaatagtggttcgata

SEQ ID NO: 3303 - DNA, 21 bp, synthetic construct
  misc_feature 1..21: note = Synthetic polynucleotide encoding artificial human antibody CDR-H2 region
  source 1..21: mol_type = other DNA
atctattatagtgggagcacc

SEQ ID NO: 3304 - DNA, 24 bp, synthetic construct
  misc_feature 1..24: note = Synthetic polynucleotide encoding artificial human antibody CDR-H2 region
  source 1..24: mol_type = other DNA
atcatccctatctttggtacagca

SEQ ID NO: 3305 - DNA, 24 bp, synthetic construct
  misc_feature 1..24: note = Synthetic polynucleotide encoding artificial human antibody CDR-H2 region
  source 1..24: mol_type = other DNA
atcaacggttacaatggtaacaca

SEQ ID NO: 3306 - DNA, 24 bp, synthetic construct
  misc_feature 1..24: note = Synthetic polynucleotide encoding artificial human antibody CDR-H2 region
  source 1..24: mol_type = other DNA
attactagtagtggtgataccata

SEQ ID NO: 3307 - DNA, 24 bp, synthetic construct
  misc_feature 1..24: note = Synthetic polynucleotide encoding artificial human antibody CDR-H2 region
  source 1..24: mol_type = other DNA
atcatccctatctttggtacaaca

SEQ ID NO: 3308 - DNA, 24 bp, synthetic construct
  misc_feature 1..24: note = Synthetic polynucleotide encoding artificial human antibody CDR-H2 region
  source 1..24: mol_type = other DNA
atctatcctggtgactctgatacc

SEQ ID NO: 3309 - DNA, 24 bp, synthetic construct
  misc_feature 1..24: note = Synthetic polynucleotide encoding artificial human antibody CDR-H2 region
  source 1..24: mol_type = other DNA
acatggtatgaggggactaacgaa

SEQ ID NO: 3310 - DNA, 24 bp, synthetic construct
  misc_feature 1..24: note = Synthetic polynucleotide encoding artificial human antibody CDR-H2 region
  source 1..24: mol_type = other DNA
atgagtggtagtggtgctggcaca

SEQ ID NO: 3311 - DNA, 24 bp, synthetic construct
  misc_feature 1..24: note = Synthetic polynucleotide encoding artificial human antibody CDR-H2 region
  source 1..24: mol_type = other DNA
atatcatatgatggaggcactaaa

SEQ ID NO: 3312 - DNA, 24 bp, synthetic construct
  misc_feature 1..24: note = Synthetic polynucleotide encoding artificial human antibody CDR-H2 region
  source 1..24: mol_type = other DNA
atatggtatgatggaagtactaaa

SEQ ID NO: 3313 - DNA, 21 bp, synthetic construct
  misc_feature 1..21: note = Synthetic polynucleotide encoding artificial human antibody CDR-H2 region
  source 1..21: mol_type = other DNA
atctatttcactgggagcacc

SEQ ID NO: 3314 - DNA, 24 bp, synthetic construct
  misc_feature 1..24: note = Synthetic polynucleotide encoding artificial human antibody CDR-H2 region
  source 1..24: mol_type = other DNA
atctatcctggtgactctgatacc

SEQ ID NO: 3315 - DNA, 21 bp, synthetic construct
  misc_feature 1..21: note = Synthetic polynucleotide encoding artificial human antibody CDR-H2 region
  source 1..21: mol_type = other DNA
atctataccagtgggagcacc

SEQ ID NO: 3316 - DNA, 27 bp, synthetic construct
  misc_feature 1..27: note = Synthetic polynucleotide encoding artificial human antibody CDR-H2 region
  source 1..27: mol_type = other DNA
acacactacaggtccaagtggtataat

SEQ ID NO: 3317 - DNA, 24 bp, synthetic construct
  misc_feature 1..24: note = Synthetic polynucleotide encoding artificial human antibody CDR-H2 region
  source 1..24: mol_type = other DNA
tttgatcctgaagatggtgaaaca

SEQ ID NO: 3318 - DNA, 24 bp, synthetic construct
  misc_feature 1..24: note = Synthetic polynucleotide encoding artificial human antibody CDR-H2 region
  source 1..24: mol_type = other DNA
attagtagtagtagtagttacata

SEQ ID NO: 3319 - DNA, 24 bp, synthetic construct
  misc_feature 1..24: note = Synthetic polynucleotide encoding artificial human antibody CDR-H2 region
  source 1..24: mol_type = other DNA
attagtggtagtggtggtagtaca

SEQ ID NO: 3320 - DNA, 24 bp, synthetic construct
  misc_feature 1..24: note = Synthetic polynucleotide encoding artificial human antibody CDR-H2 region
  source 1..24: mol_type = other DNA
atcacccctatttttaatataacg

SEQ ID NO: 3321 - DNA, 21 bp, synthetic construct
  misc_feature 1..21: note = Synthetic polynucleotide encoding artificial human antibody CDR-H2 region
  source 1..21: mol_type = other DNA
atctattatagtgggagcacc

SEQ ID NO: 3322 - DNA, 24 bp, synthetic construct
  misc_feature 1..24: note = Synthetic polynucleotide encoding artificial human antibody CDR-H2 region
  source 1..24: mol_type = other DNA
ataacttatgatggacaaatcaaa

SEQ ID NO: 3323 - DNA, 21 bp, synthetic construct
  misc_feature 1..21: note = Synthetic polynucleotide encoding artificial human antibody CDR-H2 region
  source 1..21: mol_type = other DNA
atttattatagtgggaccacc

SEQ ID NO: 3324 - DNA, 24 bp, synthetic construct
  misc_feature 1..24: note = Synthetic polynucleotide encoding artificial human antibody CDR-H2 region
  source 1..24: mol_type = other DNA
attagttggaatagtggtagcata

SEQ ID NO: 3325 - DNA, 21 bp, synthetic construct
  misc_feature 1..21: note = Synthetic polynucleotide encoding artificial human antibody CDR-H2 region
  source 1..21: mol_type = other DNA
atatatagtagtggagacacc

SEQ ID NO: 3326 - DNA, 21 bp, synthetic construct
  misc_feature 1..21: note = Synthetic polynucleotide encoding artificial human antibody CDR-H2 region
  source 1..21: mol_type = other DNA
atttattgggatgatgatgag

SEQ ID NO: 3327 - DNA, 24 bp, synthetic construct
  misc_feature 1..24: note = Synthetic polynucleotide encoding artificial human antibody CDR-H2 region
  source 1..24: mol_type = other DNA
gttagcagtagtggtagtaccatg

SEQ ID NO: 3328 - DNA, 24 bp, synthetic construct
  misc_feature 1..24: note = Synthetic polynucleotide encoding artificial human antibody CDR-H2 region
  source 1..24: mol_type = other DNA
attgatcctagtgactcttatacc

SEQ ID NO: 3329 - DNA, 24 bp, synthetic construct
  misc_feature 1..24: note = Synthetic polynucleotide encoding artificial human antibody CDR-H2 region
  source 1..24: mol_type = other DNA
atctttcctgctgactctgatacc

SEQ ID NO: 3330 - DNA, 21 bp, synthetic construct
  misc_feature 1..21: note = Synthetic polynucleotide encoding artificial human antibody CDR-H2 region
  source 1..21: mol_type = other DNA
atcttttacagtggaattacc

SEQ ID NO: 3331 - DNA, 24 bp, synthetic construct
  misc_feature 1..24: note = Synthetic polynucleotide encoding artificial human antibody CDR-H2 region
  source 1..24: mol_type = other DNA
atcatccctatttttggaacatca

SEQ ID NO: 3332 - DNA, 24 bp, synthetic construct
  misc_feature 1..24: note = Synthetic polynucleotide encoding artificial human antibody CDR-H2 region
  source 1..24: mol_type = other DNA
atcacttgggatggttctataata

SEQ ID NO: 3333 - DNA, 24 bp, synthetic construct
  misc_feature 1..24: note = Synthetic polynucleotide encoding artificial human antibody CDR-H2 region
  source 1..24: mol_type = other DNA
atcaatgcttaccagggcgtcaca

SEQ ID NO: 3334 - DNA, 24 bp, synthetic construct
  misc_feature 1..24: note = Synthetic polynucleotide encoding artificial human antibody CDR-H2 region
  source 1..24: mol_type = other DNA
ataaaggaagatggaagtgagaaa

SEQ ID NO: 3335 - DNA, 21 bp, synthetic construct
  misc_feature 1..21: note = Synthetic polynucleotide encoding artificial human antibody CDR-H2 region
  source 1..21: mol_type = other DNA
atctcttacaatgggaacacc

SEQ ID NO: 3336 - DNA, 18 bp, synthetic construct
  misc_feature 1..18: note = Synthetic polynucleotide encoding artificial human antibody CDR-H2 region
  source 1..18: mol_type = other DNA
attggtagtagtgggaca

SEQ ID NO: 3337 - DNA, 24 bp, synthetic construct
  misc_feature 1..24: note = Synthetic polynucleotide encoding artificial human antibody CDR-H2 region
  source 1..24: mol_type = other DNA
attagtggtcttggaaatagtata

SEQ ID NO: 3338 - DNA, 24 bp, synthetic construct
  misc_feature 1..24: note = Synthetic polynucleotide encoding artificial human antibody CDR-H2 region
  source 1..24: mol_type = other DNA
atatcagatgatgggaatgataaa

SEQ ID NO: 3339 - DNA, 24 bp, synthetic construct
  misc_feature 1..24: note = Synthetic polynucleotide encoding artificial human antibody CDR-H2 region
  source 1..24: mol_type = other DNA
attagttgggatggtggtagcaca

SEQ ID NO: 3340 - DNA, 24 bp, synthetic construct
  misc_feature 1..24: note = Synthetic polynucleotide encoding artificial human antibody CDR-H2 region
  source 1..24: mol_type = other DNA
atcaacacgaacaatggtaaaaca

SEQ ID NO: 3341 - DNA, 24 bp, synthetic construct
  misc_feature 1..24: note = Synthetic polynucleotide encoding artificial human antibody CDR-H2 region
  source 1..24: mol_type = other DNA
atcgattggagtggaaagaccaca

SEQ ID NO: 3342 - DNA, 24 bp, synthetic construct
  misc_feature 1..24: note = Synthetic polynucleotide encoding artificial human antibody CDR-H2 region
  source 1..24: mol_type = other DNA
attagtggtagtggtggtagcaca

SEQ ID NO: 3343 - DNA, 24 bp, synthetic construct
  misc_feature 1..24: note = Synthetic polynucleotide encoding artificial human antibody CDR-H2 region
  source 1..24: mol_type = other DNA
gtatcatatgatggaactaataaa

SEQ ID NO: 3344 - DNA, 24 bp, synthetic construct
  misc_feature 1..24: note = Synthetic polynucleotide encoding artificial human antibody CDR-H2 region
  source 1..24: mol_type = other DNA
attactagtaccagtagttactta

SEQ ID NO: 3345 - DNA, 21 bp, synthetic construct
  misc_feature 1..21: note = Synthetic polynucleotide encoding artificial human antibody CDR-H2 region
  source 1..21: mol_type = other DNA
atatataccagtgggagcacc

SEQ ID NO: 3346 - DNA, 21 bp, synthetic construct
  misc_feature 1..21: note = Synthetic polynucleotide encoding artificial human antibody CDR-H2 region
  source 1..21: mol_type = other DNA
gtctattacagtgggaggacc

SEQ ID NO: 3347 - DNA, 24 bp, synthetic construct
  misc_feature 1..24: note = Synthetic polynucleotide encoding artificial human antibody CDR-H2 region
  source 1..24: mol_type = other DNA
gtatcatatgatggaactaataaa

SEQ ID NO: 3348 - DNA, 24 bp, synthetic construct
  misc_feature 1..24: note = Synthetic polynucleotide encoding artificial human antibody CDR-H2 region
  source 1..24: mol_type = other DNA
atttatcctgttgactctgatacc

SEQ ID NO: 3349 - DNA, 24 bp, synthetic construct
  misc_feature 1..24: note = Synthetic polynucleotide encoding artificial human antibody CDR-H2 region
  source 1..24: mol_type = other DNA
accggtggtagtggttataccaaa

SEQ ID NO: 3350 - DNA, 24 bp, synthetic construct
  misc_feature 1..24: note = Synthetic polynucleotide encoding artificial human antibody CDR-H2 region
  source 1..24: mol_type = other DNA
attagtagtagtggtagtaccata

SEQ ID NO: 3351 - DNA, 24 bp, synthetic construct
  misc_feature 1..24: note = Synthetic polynucleotide encoding artificial human antibody CDR-H2 region
  source 1..24: mol_type = other DNA
ataaaggaagatggaagtgagaaa

SEQ ID NO: 3352 - DNA, 21 bp, synthetic construct
  misc_feature 1..21: note = Synthetic polynucleotide encoding artificial human antibody CDR-H2 region
  source 1..21: mol_type = other DNA
atctattacagtgggagcacc

SEQ ID NO: 3353 - DNA, 24 bp, synthetic construct
  misc_feature 1..24: note = Synthetic polynucleotide encoding artificial human antibody CDR-H2 region
  source 1..24: mol_type = other DNA
atatcatatgatggaagtaataaa

SEQ ID NO: 3354 - DNA, 24 bp, synthetic construct
  misc_feature 1..24: note = Synthetic polynucleotide encoding artificial human antibody CDR-H2 region
  source 1..24: mol_type = other DNA
attggtagtagtactactgccata

SEQ ID NO: 3355 - DNA, 21 bp, synthetic construct
  misc_feature 1..21: note = Synthetic polynucleotide encoding artificial human antibody CDR-H2 region
  source 1..21: mol_type = other DNA
atctcttacagtgggagcacc

SEQ ID NO: 3356 - DNA, 21 bp, synthetic construct
  misc_feature 1..21: note = Synthetic polynucleotide encoding artificial human antibody CDR-H2 region
  source 1..21: mol_type = other DNA
atctattatagtgggagcacc

SEQ ID NO: 3357 - DNA, 21 bp, synthetic construct
  misc_feature 1..21: note = Synthetic polynucleotide encoding artificial human antibody CDR-H2 region
  source 1..21: mol_type = other DNA
atctcttattctgggagcacc

SEQ ID NO: 3358 - DNA, 24 bp, synthetic construct
  misc_feature 1..24: note = Synthetic polynucleotide encoding artificial human antibody CDR-H2 region
  source 1..24: mol_type = other DNA
ataaagcaagatggaagtgagaaa

SEQ ID NO: 3359 - DNA, 24 bp, synthetic construct
  misc_feature 1..24: note = Synthetic polynucleotide encoding artificial human antibody CDR-H2 region
  source 1..24: mol_type = other DNA
attagttggaatagtggtagtata

SEQ ID NO: 3360 - DNA, 24 bp, synthetic construct
  misc_feature 1..24: note = Synthetic polynucleotide encoding artificial human antibody CDR-H2 region
  source 1..24: mol_type = other DNA
atctatcctggtgactctgatacc

SEQ ID NO: 3361 - DNA, 27 bp, synthetic construct
  misc_feature 1..27: note = Synthetic polynucleotide encoding artificial human antibody CDR-H2 region
  source 1..27: mol_type = other DNA
acatactacaggtcccagtggatgaat

SEQ ID NO: 3362 - DNA, 27 bp, synthetic construct
  misc_feature 1..27: note = Synthetic polynucleotide encoding artificial human antibody CDR-H2 region
  source 1..27: mol_type = other DNA
acatactacaggtccaagtggtataat

SEQ ID NO: 3363 - DNA, 21 bp, synthetic construct
  misc_feature 1..21: note = Synthetic polynucleotide encoding artificial human antibody CDR-H2 region
  source 1..21: mol_type = other DNA
ctcttttacagtgggagcacc

SEQ ID NO: 3364 - DNA, 24 bp, synthetic construct
  misc_feature 1..24: note = Synthetic polynucleotide encoding artificial human antibody CDR-H2 region
  source 1..24: mol_type = other DNA
atctatcctggtgactctgatacc

SEQ ID NO: 3365 - DNA, 24 bp, synthetic construct
  misc_feature 1..24: note = Synthetic polynucleotide encoding artificial human antibody CDR-H2 region
  source 1..24: mol_type = other DNA
atatggtatgatggaagtaataaa

SEQ ID NO: 3366 - DNA, 24 bp, synthetic construct
  misc_feature 1..24: note = Synthetic polynucleotide encoding artificial human antibody CDR-H2 region
  source 1..24: mol_type = other DNA
attagtagcagtagtcgttacgtg

SEQ ID NO: 3367 - DNA, 24 bp, synthetic construct
  misc_feature 1..24: note = Synthetic polynucleotide encoding artificial human antibody CDR-H2 region
  source 1..24: mol_type = other DNA
atcatccctatacttaatataaca

SEQ ID NO: 3368 - DNA, 24 bp, synthetic construct
  misc_feature 1..24: note = Synthetic polynucleotide encoding artificial human antibody CDR-H2 region
  source 1..24: mol_type = other DNA
attagtagtactagcaattacata

SEQ ID NO: 3369 - DNA, 24 bp, synthetic construct
  misc_feature 1..24: note = Synthetic polynucleotide encoding artificial human antibody CDR-H2 region
  source 1..24: mol_type = other DNA
atttcatatgatggaagtgatgaa

SEQ ID NO: 3370 - DNA, 24 bp, synthetic construct
  misc_feature 1..24: note = Synthetic polynucleotide encoding artificial human antibody CDR-H2 region
  source 1..24: mol_type = other DNA
atatggcatgatggaagtcataaa

SEQ ID NO: 3371 - DNA, 24 bp, synthetic construct
  misc_feature 1..24: note = Synthetic polynucleotide encoding artificial human antibody CDR-H2 region
  source 1..24: mol_type = other DNA
attagtggtgatggtcgtagcaca

SEQ ID NO: 3372 - DNA, 24 bp, synthetic construct
  misc_feature 1..24: note = Synthetic polynucleotide encoding artificial human antibody CDR-H2 region
  source 1..24: mol_type = other DNA
atatcagatgatggaaaaaataaa

SEQ ID NO: 3373 - DNA, 24 bp, synthetic construct
  misc_feature 1..24: note = Synthetic polynucleotide encoding artificial human antibody CDR-H2 region
  source 1..24: mol_type = other DNA
ataaagcaagatgggagtgagaaa

SEQ ID NO: 3374 - DNA, 24 bp, synthetic construct
  misc_feature 1..24: note = Synthetic polynucleotide encoding artificial human antibody CDR-H2 region
  source 1..24: mol_type = other DNA
atttccagtgatgggagtaccaca

SEQ ID NO: 3375 - DNA, 30 bp, synthetic construct
  misc_feature 1..30: note = Synthetic polynucleotide encoding artificial human antibody CDR-H2 region
  source 1..30: mol_type = other DNA
attaggagcaaaaccgatggtgggactaca

SEQ ID NO: 3376 - DNA, 21 bp, synthetic construct
  misc_feature 1..21: note = Synthetic polynucleotide encoding artificial human antibody CDR-H2 region
  source 1..21: mol_type = other DNA
atctctgacattggggacacc

SEQ ID NO: 3377 - DNA, 24 bp, synthetic construct
  misc_feature 1..24: note = Synthetic polynucleotide encoding artificial human antibody CDR-H2 region
  source 1..24: mol_type = other DNA
atcatccccatctttggtacagca

SEQ ID NO: 3378 - DNA, 21 bp, synthetic construct
  misc_feature 1..21: note = Synthetic polynucleotide encoding artificial human antibody CDR-H2 region
  source 1..21: mol_type = other DNA
atctattttagtgggaaaact

SEQ ID NO: 3379 - DNA, 24 bp, synthetic construct
  misc_feature 1..24: note = Synthetic polynucleotide encoding artificial human antibody CDR-H2 region
  source 1..24: mol_type = other DNA
attaatcgtgatgggagttacaca

SEQ ID NO: 3380 - DNA, 21 bp, synthetic construct
  misc_feature 1..21: note = Synthetic polynucleotide encoding artificial human antibody CDR-H2 region
  source 1..21: mol_type = other DNA
gtctattatagtgggagcacc

SEQ ID NO: 3381 - DNA, 21 bp, synthetic construct
  misc_feature 1..21: note = Synthetic polynucleotide encoding artificial human antibody CDR-H2 region
  source 1..21: mol_type = other DNA
gtgtctcccagcgggactaac

SEQ ID NO: 3382 - DNA, 24 bp, synthetic construct
  misc_feature 1..24: note = Synthetic polynucleotide encoding artificial human antibody CDR-H2 region
  source 1..24: mol_type = other DNA
atcatccctattgttggagaagca

SEQ ID NO: 3383 - DNA, 24 bp, synthetic construct
  misc_feature 1..24: note = Synthetic polynucleotide encoding artificial human antibody CDR-H2 region
  source 1..24: mol_type = other DNA
attaatagtgatgggagtagcaca

SEQ ID NO: 3384 - DNA, 21 bp, synthetic construct
  misc_feature 1..21: note = Synthetic polynucleotide encoding artificial human antibody CDR-H2 region
  source 1..21: mol_type = other DNA
atctattacaatgggagcacc

SEQ ID NO: 3385 - DNA, 24 bp, synthetic construct
  misc_feature 1..24: note = Synthetic polynucleotide encoding artificial human antibody CDR-H2 region
  source 1..24: mol_type = other DNA
attagtggtagtggtggtagcaca

SEQ ID NO: 3386 - DNA, 24 bp, synthetic construct
  misc_feature 1..24: note = Synthetic polynucleotide encoding artificial human antibody CDR-H2 region
  source 1..24: mol_type = other DNA
attagtgccagtggtcgtaccaca

SEQ ID NO: 3387 - DNA, 24 bp, synthetic construct
  misc_feature 1..24: note = Synthetic polynucleotide encoding artificial human antibody CDR-H2 region
  source 1..24: mol_type = other DNA
attactgctaatgggggtagcaca

SEQ ID NO: 3388 - DNA, 21 bp, synthetic construct
  misc_feature 1..21: note = Synthetic polynucleotide encoding artificial human antibody CDR-H2 region
  source 1..21: mol_type = other DNA
atctatcatagggggacctcc

SEQ ID NO: 3389 - DNA, 24 bp, synthetic construct
  misc_feature 1..24: note = Synthetic polynucleotide encoding artificial human antibody CDR-H2 region
  source 1..24: mol_type = other DNA
atctcatttgatggaagcaatcaa

SEQ ID NO: 3390 - DNA, 24 bp, synthetic construct
  misc_feature 1..24: note = Synthetic polynucleotide encoding artificial human antibody CDR-H2 region
  source 1..24: mol_type = other DNA
atcgaccctagtggcggcagcaga

SEQ ID NO: 3391 - DNA, 24 bp, synthetic construct
  misc_feature 1..24: note = Synthetic polynucleotide encoding artificial human antibody CDR-H2 region
  source 1..24: mol_type = other DNA
attaatactgatgggagtagcaca

SEQ ID NO: 3392 - DNA, 24 bp, synthetic construct
  misc_feature 1..24: note = Synthetic polynucleotide encoding artificial human antibody CDR-H2 region
  source 1..24: mol_type = other DNA
tttgatcctgaaggtggtgaaaca

SEQ ID NO: 3393 - DNA, 21 bp, synthetic construct
  misc_feature 1..21: note = Synthetic polynucleotide encoding artificial human antibody CDR-H2 region
  source 1..21: mol_type = other DNA
atctattataatggagacacc

SEQ ID NO: 3394 - DNA, 24 bp, synthetic construct
  misc_feature 1..24: note = Synthetic polynucleotide encoding artificial human antibody CDR-H2 region
  source 1..24: mol_type = other DNA
atcagcgcttacactggtaacaca

SEQ ID NO: 3395 - DNA, 24 bp, synthetic construct
  misc_feature 1..24: note = Synthetic polynucleotide encoding artificial human antibody CDR-H2 region
  source 1..24: mol_type = other DNA
attatttggaatagtggtacgaca

SEQ ID NO: 3396 - DNA, 24 bp, synthetic construct
  misc_feature 1..24: note = Synthetic polynucleotide encoding artificial human antibody CDR-H2 region
  source 1..24: mol_type = other DNA
ataaatactgatggtagtcgagga

SEQ ID NO: 3397 - DNA, 21 bp, synthetic construct
  misc_feature 1..21: note = Synthetic polynucleotide encoding artificial human antibody CDR-H2 region
  source 1..21: mol_type = other DNA
atttatcacagtggcagcacc

SEQ ID NO: 3398 - DNA, 30 bp, synthetic construct
  misc_feature 1..30: note = Synthetic polynucleotide encoding artificial human antibody CDR-H2 region
  source 1..30: mol_type = other DNA
attaaaagtaaaagtgatggtgggtcaaca

SEQ ID NO: 3399 - DNA, 21 bp, synthetic construct
  misc_feature 1..21: note = Synthetic polynucleotide encoding artificial human antibody CDR-H2 region
  source 1..21: mol_type = other DNA
atttatagcggtggtaccaca

SEQ ID NO: 3400 - DNA, 30 bp, synthetic construct
  misc_feature 1..30: note = Synthetic polynucleotide encoding artificial human antibody CDR-H2 region
  source 1..30: mol_type = other DNA
attaaaaacagagctaacagttacaacaca

SEQ ID NO: 3401 - DNA, 24 bp, synthetic construct
  misc_feature 1..24: note = Synthetic polynucleotide encoding artificial human antibody CDR-H2 region
  source 1..24: mol_type = other DNA
atatcttttgatggaagtgataaa

SEQ ID NO: 3402 - DNA, 24 bp, synthetic construct
  misc_feature 1..24: note = Synthetic polynucleotide encoding artificial human antibody CDR-H2 region
  source 1..24: mol_type = other DNA
attactgctggtggaagtttcata

SEQ ID NO: 3403 - DNA, 24 bp, synthetic construct
  misc_feature 1..24: note = Synthetic polynucleotide encoding artificial human antibody CDR-H2 region
  source 1..24: mol_type = other DNA
atcaaccctaatagtggtggcaca

SEQ ID NO: 3404 - DNA, 24 bp, synthetic construct
  misc_feature 1..24: note = Synthetic polynucleotide encoding artificial human antibody CDR-H2 region
  source 1..24: mol_type = other DNA
attagttatagtggtggtagcaca

SEQ ID NO: 3405 - DNA, 24 bp, synthetic construct
  misc_feature 1..24: note = Synthetic polynucleotide encoding artificial human antibody CDR-H2 region
  source 1..24: mol_type = other DNA
attagtagtagtggtggtgacatc

SEQ ID NO: 3406 - DNA, 24 bp, synthetic construct
  misc_feature 1..24: note = Synthetic polynucleotide encoding artificial human antibody CDR-H2 region
  source 1..24: mol_type = other DNA
attagttggaatagtggtgacata

SEQ ID NO: 3407 - skipped

SEQ ID NO: 3408 - DNA, 24 bp, synthetic construct
  misc_feature 1..24: note = Synthetic polynucleotide encoding artificial human antibody CDR-H2 region
  source 1..24: mol_type = other DNA
attggtggtagtggtggttacaca

SEQ ID NO: 3409 - DNA, 21 bp, synthetic construct
  misc_feature 1..21: note = Synthetic polynucleotide encoding artificial human antibody CDR-H2 region
  source 1..21: mol_type = other DNA
atctttcacagtgggagcgcc

SEQ ID NO: 3410 - DNA, 24 bp, synthetic construct
  misc_feature 1..24: note = Synthetic polynucleotide encoding artificial human antibody CDR-H2 region
  source 1..24: mol_type = other DNA
atgatcaccacttttggaaaagcg

SEQ ID NO: 3411 - DNA, 21 bp, synthetic construct
  misc_feature 1..21: note = Synthetic polynucleotide encoding artificial human antibody CDR-H2 region
  source 1..21: mol_type = other DNA
atctattacagtgggagcacc

SEQ ID NO: 3412 - DNA, 24 bp, synthetic construct
  misc_feature 1..24: note = Synthetic polynucleotide encoding artificial human antibody CDR-H2 region
  source 1..24: mol_type = other DNA
atcagcgcttacaatgggaacaca

SEQ ID NO: 3413 - DNA, 24 bp, synthetic construct
  misc_feature 1..24: note = Synthetic polynucleotide encoding artificial human antibody CDR-H2 region
  source 1..24: mol_type = other DNA
atcaacaccgtcactgggatccca

SEQ ID NO: 3414 - DNA, 21 bp, synthetic construct
  misc_feature 1..21: note = Synthetic polynucleotide encoding artificial human antibody CDR-H2 region
  source 1..21: mol_type = other DNA
gtctattatagtgggagcacc

SEQ ID NO: 3415 - DNA, 24 bp, synthetic construct
  misc_feature 1..24: note = Synthetic polynucleotide encoding artificial human antibody CDR-H2 region
  source 1..24: mol_type = other DNA
atagcctatgatggaagtcagaaa

SEQ ID NO: 3416 - DNA, 24 bp, synthetic construct
  misc_feature 1..24: note = Synthetic polynucleotide encoding artificial human antibody CDR-H2 region
  source 1..24: mol_type = other DNA
atcatccctgtttttggaacaaca

SEQ ID NO: 3417 - DNA, 24 bp, synthetic construct
  misc_feature 1..24: note = Synthetic polynucleotide encoding artificial human antibody CDR-H2 region
  source 1..24: mol_type = other DNA
atcaacgctggcaatggtgacacg

SEQ ID NO: 3418 - DNA, 21 bp, synthetic construct
  misc_feature 1..21: note = Synthetic polynucleotide encoding artificial human antibody CDR-H2 region
  source 1..21: mol_type = other DNA
atctatcatagtgggagcacc

SEQ ID NO: 3419 - DNA, 24 bp, synthetic construct
  misc_feature 1..24: note = Synthetic polynucleotide encoding artificial human antibody CDR-H2 region
  source 1..24: mol_type = other DNA
gtagagggataccgaagtgaagaa

SEQ ID NO: 3420 - DNA, 24 bp, synthetic construct
  misc_feature 1..24: note = Synthetic polynucleotide encoding artificial human antibody CDR-H2 region
  source 1..24: mol_type = other DNA
attagtgccagtggcggtggcacc

SEQ ID NO: 3421 - DNA, 21 bp, synthetic construct
  misc_feature 1..21: note = Synthetic polynucleotide encoding artificial human antibody CDR-H2 region
  source 1..21: mol_type = other DNA
atctattacagtgggacctcc

SEQ ID NO: 3422 - DNA, 24 bp, synthetic construct
  misc_feature 1..24: note = Synthetic polynucleotide encoding artificial human antibody CDR-H2 region
  source 1..24: mol_type = other DNA
atcaaccctaaaactggtgacaca

SEQ ID NO: 3423 - DNA, 24 bp, synthetic construct
  misc_feature 1..24: note = Synthetic polynucleotide encoding artificial human antibody CDR-H2 region
  source 1..24: mol_type = other DNA
atatcatatgatggaagtaataaa

SEQ ID NO: 3424 - DNA, 24 bp, synthetic construct
  misc_feature 1..24: note = Synthetic polynucleotide encoding artificial human antibody CDR-H2 region
  source 1..24: mol_type = other DNA
attagtagtagtagtagttacata

SEQ ID NO: 3425 - DNA, 21 bp, synthetic construct
  misc_feature 1..21: note = Synthetic polynucleotide encoding artificial human antibody CDR-H2 region
  source 1..21: mol_type = other DNA
atctattatagtgggagcacc

SEQ ID NO: 3426 - DNA, 30 bp, synthetic construct
  misc_feature 1..30: note = Synthetic polynucleotide encoding artificial human antibody CDR-H2 region
  source 1..30: mol_type = other DNA
attaaaagcaaaactgatggtgggacaaca

SEQ ID NO: 3427 - DNA, 24 bp, synthetic construct
  misc_feature 1..24: note = Synthetic polynucleotide encoding artificial human antibody CDR-H2 region
  source 1..24: mol_type = other DNA
atcaaccctagttttggaagcaca

SEQ ID NO: 3428 - DNA, 24 bp, synthetic construct
  misc_feature 1..24: note = Synthetic polynucleotide encoding artificial human antibody CDR-H2 region
  source 1..24: mol_type = other DNA
atcatgcctatgtttggaagaaca

SEQ ID NO: 3429 - DNA, 24 bp, synthetic construct
  misc_feature 1..24: note = Synthetic polynucleotide encoding artificial human antibody CDR-H2 region
  source 1..24: mol_type = other DNA
atcagcagtactggaaccaccaca

SEQ ID NO: 3430 - DNA, 24 bp, synthetic construct
  misc_feature 1..24: note = Synthetic polynucleotide encoding artificial human antibody CDR-H2 region
  source 1..24: mol_type = other DNA
atatcaaatgacggaagtaataaa

SEQ ID NO: 3431 - DNA, 24 bp, synthetic construct
  misc_feature 1..24: note = Synthetic polynucleotide encoding artificial human antibody CDR-H2 region
  source 1..24: mol_type = other DNA
atctatcctggtgactctgatacc

SEQ ID NO: 3432 - DNA, 24 bp, synthetic construct
  misc_feature 1..24: note = Synthetic polynucleotide encoding artificial human antibody CDR-H2 region
  source 1..24: mol_type = other DNA
attagtcgggggagcagtgtgata

SEQ ID NO: 3433 - DNA, 21 bp, synthetic construct
  misc_feature 1..21: note = Synthetic polynucleotide encoding artificial human antibody CDR-H2 region
  source 1..21: mol_type = other DNA
attttttcgaatgacgaaaaa

SEQ ID NO: 3434 - DNA, 24 bp, synthetic construct
  misc_feature 1..24: note = Synthetic polynucleotide encoding artificial human antibody CDR-H2 region
  source 1..24: mol_type = other DNA
atcaaccctaacagtggtggcaca

SEQ ID NO: 3435 - DNA, 24 bp, synthetic construct
  misc_feature 1..24: note = Synthetic polynucleotide encoding artificial human antibody CDR-H2 region
  source 1..24: mol_type = other DNA
atcagcgcttacaatggtaacaca

SEQ ID NO: 3436 - DNA, 27 bp, synthetic construct
  misc_feature 1..27: note = Synthetic polynucleotide encoding artificial human antibody CDR-H2 region
  source 1..27: mol_type = other DNA
acattctacaggaccaagtggtatagt

SEQ ID NO: 3437 - DNA, 21 bp, synthetic construct
  misc_feature 1..21: note = Synthetic polynucleotide encoding artificial human antibody CDR-H2 region
  source 1..21: mol_type = other DNA
atctgtcatagtgggagcacc

SEQ ID NO: 3438 - DNA, 21 bp, synthetic construct
  misc_feature 1..21: note = Synthetic polynucleotide encoding artificial human antibody CDR-H2 region
  source 1..21: mol_type = other DNA
atttatagcggtggtagcaca

SEQ ID NO: 3439 - DNA, 24 bp, synthetic construct
  misc_feature 1..24: note = Synthetic polynucleotide encoding artificial human antibody CDR-H2 region
  source 1..24: mol_type = other DNA
atcaaccctaatggtggtactact

SEQ ID NO: 3440 - DNA, 21 bp, synthetic construct
  misc_feature 1..21: note = Synthetic polynucleotide encoding artificial human antibody CDR-H2 region
  source 1..21: mol_type = other DNA
atctattacagtgggagcacc

SEQ ID NO: 3441 - DNA, 21 bp, synthetic construct
  misc_feature 1..21: note = Synthetic polynucleotide encoding artificial human antibody CDR-H2 region
  source 1..21: mol_type = other DNA
atccattatactgggagcacc

SEQ ID NO: 3442 - DNA, 24 bp, synthetic construct
  misc_feature 1..24: note = Synthetic polynucleotide encoding artificial human antibody CDR-H2 region
  source 1..24: mol_type = other DNA
atatcatatgatggaagtaataaa

SEQ ID NO: 3443 - DNA, 24 bp, synthetic construct
  misc_feature 1..24: note = Synthetic polynucleotide encoding artificial human antibody CDR-H2 region
  source 1..24: mol_type = other DNA
attagtggcagtggtggtagcaca

SEQ ID NO: 3444 - DNA, 21 bp, synthetic construct
  misc_feature 1..21: note = Synthetic polynucleotide encoding artificial human antibody CDR-H2 region
  source 1..21: mol_type = other DNA
atctattatagtgggagcacc

SEQ ID NO: 3445 - DNA, 24 bp, synthetic construct
  misc_feature 1..24: note = Synthetic polynucleotide encoding artificial human antibody CDR-H2 region
  source 1..24: mol_type = other DNA
atcaaccctaacagtggtggcaca

SEQ ID NO: 3446 - DNA, 24 bp, synthetic construct
  misc_feature 1..24: note = Synthetic polynucleotide encoding artificial human antibody CDR-H2 region
  source 1..24: mol_type = other DNA
atcaatcctgctgactctgatacc

SEQ ID NO: 3447 - DNA, 24 bp, synthetic construct
  misc_feature 1..24: note = Synthetic polynucleotide encoding artificial human antibody CDR-H2 region
  source 1..24: mol_type = other DNA
atctatcctgctgactctgatacc

SEQ ID NO: 3448 - DNA, 24 bp, synthetic construct
  misc_feature 1..24: note = Synthetic polynucleotide encoding artificial human antibody CDR-H2 region
  source 1..24: mol_type = other DNA
atcagttatagtggtaataccaca

SEQ ID NO: 3449 - DNA, 24 bp, synthetic construct
  misc_feature 1..24: note = Synthetic polynucleotide encoding artificial human antibody CDR-H2 region
  source 1..24: mol_type = other DNA
atcaaccctggtggtggtagcaca

SEQ ID NO: 3450 - DNA, 24 bp, synthetic construct
  misc_feature 1..24: note = Synthetic polynucleotide encoding artificial human antibody CDR-H2 region
  source 1..24: mol_type = other DNA
attactagtcctggtggtcacaca

SEQ ID NO: 3451 - DNA, 24 bp, synthetic construct
  misc_feature 1..24: note = Synthetic polynucleotide encoding artificial human antibody CDR-H2 region
  source 1..24: mol_type = other DNA
attagtggcagtggtggtagcaca

SEQ ID NO: 3452 - DNA, 24 bp, synthetic construct
  misc_feature 1..24: note = Synthetic polynucleotide encoding artificial human antibody CDR-H2 region
  source 1..24: mol_type = other DNA
atcaaccctgtcaatggggtcaca

SEQ ID NO: 3453 - DNA, 24 bp, synthetic construct
  misc_feature 1..24: note = Synthetic polynucleotide encoding artificial human antibody CDR-H2 region
  source 1..24: mol_type = other DNA
atcaacaccaacactgggaaccca

SEQ ID NO: 3454 - DNA, 24 bp, synthetic construct
  misc_feature 1..24: note = Synthetic polynucleotide encoding artificial human antibody CDR-H2 region
  source 1..24: mol_type = other DNA
atttcatctgatggaagcaataaa

SEQ ID NO: 3455 - DNA, 24 bp, synthetic construct
  misc_feature 1..24: note = Synthetic polynucleotide encoding artificial human antibody CDR-H2 region
  source 1..24: mol_type = other DNA
gttagtggaagtggttttaccact

SEQ ID NO: 3456 - DNA, 24 bp, synthetic construct
  misc_feature 1..24: note = Synthetic polynucleotide encoding artificial human antibody CDR-H2 region
  source 1..24: mol_type = other DNA
attagtagtagtagtagttacata

SEQ ID NO: 3457 - DNA, 21 bp, synthetic construct
  misc_feature 1..21: note = Synthetic polynucleotide encoding artificial human antibody CDR-H2 region
  source 1..21: mol_type = other DNA
attaattgggatgatgataag

SEQ ID NO: 3458 - DNA, 21 bp, synthetic construct
  misc_feature 1..21: note = Synthetic polynucleotide encoding artificial human antibody CDR-H2 region
  source 1..21: mol_type = other DNA
atttattgggatgatgatacg

SEQ ID NO: 3459 - DNA, 21 bp, synthetic construct
  misc_feature 1..21: note = Synthetic polynucleotide encoding artificial human antibody CDR-H2 region
  source 1..21: mol_type = other DNA
atctattacattgggaccacc

SEQ ID NO: 3460 - DNA, 24 bp, synthetic construct
  misc_feature 1..24: note = Synthetic polynucleotide encoding artificial human antibody CDR-H2 region
  source 1..24: mol_type = other DNA
ataaaccaagatggaggtgagaaa

SEQ ID NO: 3461 - DNA, 24 bp, synthetic construct
  misc_feature 1..24: note = Synthetic polynucleotide encoding artificial human antibody CDR-H2 region
  source 1..24: mol_type = other DNA
atcatccctgtctttggtccacca

SEQ ID NO: 3462 - DNA, 24 bp, synthetic construct
  misc_feature 1..24: note = Synthetic polynucleotide encoding artificial human antibody CDR-H2 region
  source 1..24: mol_type = other DNA
atcgtccctatctttgatacaaca

SEQ ID NO: 3463 - DNA, 24 bp, synthetic construct
  misc_feature 1..24: note = Synthetic polynucleotide encoding artificial human antibody CDR-H2 region
  source 1..24: mol_type = other DNA
atcaacgctggcaatgggaacaca

SEQ ID NO: 3464 - DNA, 24 bp, synthetic construct
  misc_feature 1..24: note = Synthetic polynucleotide encoding artificial human antibody CDR-H2 region
  source 1..24: mol_type = other DNA
atcagcccttacaatggtaacata

SEQ ID NO: 3465 - DNA, 24 bp, synthetic construct
  misc_feature 1..24: note = Synthetic polynucleotide encoding artificial human antibody CDR-H2 region
  source 1..24: mol_type = other DNA
attagtggtcctggtgaaagttca

SEQ ID NO: 3466 - DNA, 24 bp, synthetic construct
  misc_feature 1..24: note = Synthetic polynucleotide encoding artificial human antibody CDR-H2 region
  source 1..24: mol_type = other DNA
atcaaccctagcggtggttacaca

SEQ ID NO: 3467 - DNA, 24 bp, synthetic construct
  misc_feature 1..24: note = Synthetic polynucleotide encoding artificial human antibody CDR-H2 region
  source 1..24: mol_type = other DNA
gtctttcctggtgactctgatatc

SEQ ID NO: 3468 - DNA, 24 bp, synthetic construct
  misc_feature 1..24: note = Synthetic polynucleotide encoding artificial human antibody CDR-H2 region
  source 1..24: mol_type = other DNA
atatggtatgatggaaccaacaag

SEQ ID NO: 3469 - DNA, 24 bp, synthetic construct
  misc_feature 1..24: note = Synthetic polynucleotide encoding artificial human antibody CDR-H2 region
  source 1..24: mol_type = other DNA
attgatcctagtgactcttatacc

SEQ ID NO: 3470 - DNA, 24 bp, synthetic construct
  misc_feature 1..24: note = Synthetic polynucleotide encoding artificial human antibody CDR-H2 region
  source 1..24: mol_type = other DNA
attagtggggatggtactcggaca

SEQ ID NO: 3471 - DNA, 24 bp, synthetic construct
  misc_feature 1..24: note = Synthetic polynucleotide encoding artificial human antibody CDR-H2 region
  source 1..24: mol_type = other DNA
acttatcatcgcacaactaccacc

SEQ ID NO: 3472 - DNA, 24 bp, synthetic construct
  misc_feature 1..24: note = Synthetic polynucleotide encoding artificial human antibody CDR-H2 region
  source 1..24: mol_type = other DNA
atcacccctaattctggcacacca

SEQ ID NO: 3473 - DNA, 30 bp, synthetic construct
  misc_feature 1..30: note = Synthetic polynucleotide encoding artificial human antibody CDR-H2 region
  source 1..30: mol_type = other DNA
attagaagcaaagcttatggtgggacaaga

SEQ ID NO: 3474 - DNA, 24 bp, synthetic construct
  misc_feature 1..24: note = Synthetic polynucleotide encoding artificial human antibody CDR-H2 region
  source 1..24: mol_type = other DNA
ataagcggttacaatggaagaaca

SEQ ID NO: 3475 - DNA, 24 bp, synthetic construct
  misc_feature 1..24: note = Synthetic polynucleotide encoding artificial human antibody CDR-H2 region
  source 1..24: mol_type = other DNA
atgaacgcagatgggagtgagaaa

SEQ ID NO: 3476 - DNA, 24 bp, synthetic construct
  misc_feature 1..24: note = Synthetic polynucleotide encoding artificial human antibody CDR-H2 region
  source 1..24: mol_type = other DNA
attagtagtagtagtagtaccata

SEQ ID NO: 3477 - DNA, 21 bp, synthetic construct
  misc_feature 1..21: note = Synthetic polynucleotide encoding artificial human antibody CDR-H2 region
  source 1..21: mol_type = other DNA
atctactatagtgggagcacc

SEQ ID NO: 3478 - DNA, 21 bp, synthetic construct
  misc_feature 1..21: note = Synthetic polynucleotide encoding artificial human antibody CDR-H2 region
  source 1..21: mol_type = other DNA
atgttttatggtgggagcacc

SEQ ID NO: 3479 - DNA, 24 bp, synthetic construct
  misc_feature 1..24: note = Synthetic polynucleotide encoding artificial human antibody CDR-H2 region
  source 1..24: mol_type = other DNA
atatggtatgatggaagtaatgaa

SEQ ID NO: 3480 - DNA, 24 bp, synthetic construct
  misc_feature 1..24: note = Synthetic polynucleotide encoding artificial human antibody CDR-H2 region
  source 1..24: mol_type = other DNA
atcagcactgacagtggtaacaca

SEQ ID NO: 3481 - DNA, 24 bp, synthetic construct
  misc_feature 1..24: note = Synthetic polynucleotide encoding artificial human antibody CDR-H2 region
  source 1..24: mol_type = other DNA
attcattggaatggtggtagcaca

SEQ ID NO: 3482 - DNA, 24 bp, synthetic construct
  misc_feature 1..24: note = Synthetic polynucleotide encoding artificial human antibody CDR-H2 region
  source 1..24: mol_type = other DNA
atgtggtatgatggaaataataaa

SEQ ID NO: 3483 - DNA, 24 bp, synthetic construct
  misc_feature 1..24: note = Synthetic polynucleotide encoding artificial human antibody CDR-H2 region
  source 1..24: mol_type = other DNA
attagtggcagtggtggtcggaca

SEQ ID NO: 3484 - DNA, 30 bp, synthetic construct
  misc_feature 1..30: note = Synthetic polynucleotide encoding artificial human antibody CDR-H2 region
  source 1..30: mol_type = other DNA
attaaaaccaaaactgatggtgggacaaca

SEQ ID NO: 3485 - DNA, 24 bp, synthetic construct
  misc_feature 1..24: note = Synthetic polynucleotide encoding artificial human antibody CDR-H2 region
  source 1..24: mol_type = other DNA
atttggcatgatggcagtaagacg

SEQ ID NO: 3486 - DNA, 24 bp, synthetic construct
  misc_feature 1..24: note = Synthetic polynucleotide encoding artificial human antibody CDR-H2 region
  source 1..24: mol_type = other DNA
attagcccttacacccgtcagaca

SEQ ID NO: 3487 - DNA, 24 bp, synthetic construct
  misc_feature 1..24: note = Synthetic polynucleotide encoding artificial human antibody CDR-H2 region
  source 1..24: mol_type = other DNA
acacgttttgatggaagtgaaaaa

SEQ ID NO: 3488 - DNA, 24 bp, synthetic construct
  misc_feature 1..24: note = Synthetic polynucleotide encoding artificial human antibody CDR-H2 region
  source 1..24: mol_type = other DNA
atatcacatgatggaagtaataac

SEQ ID NO: 3489 - DNA, 24 bp, synthetic construct
  misc_feature 1..24: note = Synthetic polynucleotide encoding artificial human antibody CDR-H2 region
  source 1..24: mol_type = other DNA
atccacgttggaaatgatcacaca

SEQ ID NO: 3490 - DNA, 24 bp, synthetic construct
  misc_feature 1..24: note = Synthetic polynucleotide encoding artificial human antibody CDR-H2 region
  source 1..24: mol_type = other DNA
tttgatcctagtgactcttataac

SEQ ID NO: 3491 - DNA, 21 bp, synthetic construct
  misc_feature 1..21: note = Synthetic polynucleotide encoding artificial human antibody CDR-H2 region
  source 1..21: mol_type = other DNA
atttattgggatgatgataag

SEQ ID NO: 3492 - DNA, 24 bp, synthetic construct
  misc_feature 1..24: note = Synthetic polynucleotide encoding artificial human antibody CDR-H2 region
  source 1..24: mol_type = other DNA
attagtggagatagtcgtgacatc

SEQ ID NO: 3493 - DNA, 24 bp, synthetic construct
  misc_feature 1..24: note = Synthetic polynucleotide encoding artificial human antibody CDR-H2 region
  source 1..24: mol_type = other DNA
atcatacctgtcctaggtatacca

SEQ ID NO: 3494 - DNA, 21 bp, synthetic construct
  misc_feature 1..21: note = Synthetic polynucleotide encoding artificial human antibody CDR-H2 region
  source 1..21: mol_type = other DNA
gtctattacagtgggaacacc

SEQ ID NO: 3495 - DNA, 24 bp, synthetic construct
  misc_feature 1..24: note = Synthetic polynucleotide encoding artificial human antibody CDR-H2 region
  source 1..24: mol_type = other DNA
attagtagtaatgggggtagcaca

SEQ ID NO: 3496 - DNA, 24 bp, synthetic construct
  misc_feature 1..24: note = Synthetic polynucleotide encoding artificial human antibody CDR-H2 region
  source 1..24: mol_type = other DNA
attagtagtagtaggagtaccata

SEQ ID NO: 3497 - DNA, 21 bp, synthetic construct
  misc_feature 1..21: note = Synthetic polynucleotide encoding artificial human antibody CDR-H2 region
  source 1..21: mol_type = other DNA
atcattcatactgggaccacc

SEQ ID NO: 3498 - DNA, 24 bp, synthetic construct
  misc_feature 1..24: note = Synthetic polynucleotide encoding artificial human antibody CDR-H2 region
  source 1..24: mol_type = other DNA
attaatactgatgggactgtcaca

SEQ ID NO: 3499 - DNA, 21 bp, synthetic construct
  misc_feature 1..21: note = Synthetic polynucleotide encoding artificial human antibody CDR-H2 region
  source 1..21: mol_type = other DNA
atttattgggatgatgataag

SEQ ID NO: 3500 - DNA, 24 bp, synthetic construct
  misc_feature 1..24: note = Synthetic polynucleotide encoding artificial human antibody CDR-H2 region
  source 1..24: mol_type = other DNA
atatcatatgatggaagtaataaa

SEQ ID NO: 3501 - DNA, 24 bp, synthetic construct
  misc_feature 1..24: note = Synthetic polynucleotide encoding artificial human antibody CDR-H2 region
  source 1..24: mol_type = other DNA
attagtagtagtggtagtaccata

SEQ ID NO: 3502 - DNA, 24 bp, synthetic construct
  misc_feature 1..24: note = Synthetic polynucleotide encoding artificial human antibody CDR-H2 region
  source 1..24: mol_type = other DNA
attagtagtagtagtagtaccata

SEQ ID NO: 3503 - DNA, 21 bp, synthetic construct
  misc_feature 1..21: note = Synthetic polynucleotide encoding artificial human antibody CDR-H2 region
  source 1..21: mol_type = other DNA
attgattgggatgatgataaa

SEQ ID NO: 3504 - DNA, 24 bp, synthetic construct
  misc_feature 1..24: note = Synthetic polynucleotide encoding artificial human antibody CDR-H2 region
  source 1..24: mol_type = other DNA
ataaagcaagatggaagtgagaaa

SEQ ID NO: 3505 - DNA, 24 bp, synthetic construct
  misc_feature 1..24: note = Synthetic polynucleotide encoding artificial human antibody CDR-H2 region
  source 1..24: mol_type = other DNA
tttgttggtagcggtgacaccaca

SEQ ID NO: 3506 - DNA, 24 bp, synthetic construct
  misc_feature 1..24: note = Synthetic polynucleotide encoding artificial human antibody CDR-H2 region
  source 1..24: mol_type = other DNA
attagtagtagtagtagtaccaaa

SEQ ID NO: 3507 - DNA, 24 bp, synthetic construct
  misc_feature 1..24: note = Synthetic polynucleotide encoding artificial human antibody CDR-H2 region
  source 1..24: mol_type = other DNA
atcaaccctaagactggtgccaca

SEQ ID NO: 3508 - DNA, 21 bp, synthetic construct
  misc_feature 1..21: note = Synthetic polynucleotide encoding artificial human antibody CDR-H2 region
  source 1..21: mol_type = other DNA
atctatgccagtgggagcacc

SEQ ID NO: 3509 - DNA, 24 bp, synthetic construct
  misc_feature 1..24: note = Synthetic polynucleotide encoding artificial human antibody CDR-H2 region
  source 1..24: mol_type = other DNA
atctatcctggtgactctgatacc

SEQ ID NO: 3510 - DNA, 30 bp, synthetic construct; identical to SEQ ID NO: 3426
  misc_feature 1..30: note = Synthetic polynucleotide encoding artificial human antibody CDR-H2 region
  source 1..30: mol_type = other DNA

SEQ ID NO: 3511 - DNA, 24 bp, synthetic construct
  misc_feature 1..24: note = Synthetic polynucleotide encoding artificial human antibody CDR-H2 region
  source 1..24: mol_type = other DNA
atatcaaaagatggaaacagcaaa

SEQ ID NO: 3512 - DNA, 30 bp, synthetic construct
  misc_feature 1..30: note = Synthetic polynucleotide encoding artificial human antibody CDR-H2 region
  source 1..30: mol_type = other DNA
attagaagcaaaactaagaattacgcgaca

SEQ ID NO: 3513 - DNA, 21 bp, synthetic construct
  misc_feature 1..21: note = Synthetic polynucleotide encoding artificial human antibody CDR-H2 region
  source 1..21: mol_type = other DNA
atctacaccagtgggagcacc

SEQ ID NO: 3514 - DNA, 30 bp, synthetic construct
  misc_feature 1..30: note = Synthetic polynucleotide encoding artificial human antibody CDR-H2 region
  source 1..30: mol_type = other DNA
attagtaccaaaggttatgatgagacagca

SEQ ID NO: 3515 - DNA, 24 bp, synthetic construct
  misc_feature 1..24: note = Synthetic polynucleotide encoding artificial human antibody CDR-H2 region
  source 1..24: mol_type = other DNA
ataccgtatgatggaagtaataaa

SEQ ID NO: 3516 - DNA, 24 bp, synthetic construct
  misc_feature 1..24: note = Synthetic polynucleotide encoding artificial human antibody CDR-H2 region
  source 1..24: mol_type = other DNA
atcagtactagtacaagtaccata

SEQ ID NO: 3517 - DNA, 24 bp, synthetic construct
  misc_feature 1..24: note = Synthetic polynucleotide encoding artificial human antibody CDR-H2 region
  source 1..24: mol_type = other DNA
attagtagtagtggtagtaccata

SEQ ID NO: 3518 - DNA, 24 bp, synthetic construct
  misc_feature 1..24: note = Synthetic polynucleotide encoding artificial human antibody CDR-H2 region
  source 1..24: mol_type = other DNA
attagtagtagtagtagtaccata

SEQ ID NO: 3519 - DNA, 21 bp, synthetic construct
  misc_feature 1..21: note = Synthetic polynucleotide encoding artificial human antibody CDR-H2 region
  source 1..21: mol_type = other DNA
atgtacagtggtggcgccaca

SEQ ID NO: 3520 - DNA, 24 bp, synthetic construct
  misc_feature 1..24: note = Synthetic polynucleotide encoding artificial human antibody CDR-H2 region
  source 1..24: mol_type = other DNA
atctatcctggtgactctgatacc

SEQ ID NO: 3521 - DNA, 30 bp, synthetic construct
  misc_feature 1..30: note = Synthetic polynucleotide encoding artificial human antibody CDR-H2 region
  source 1..30: mol_type = other DNA
attagaagtaaacctaacagttacgcgaca

SEQ ID NO: 3522 - DNA, 24 bp, synthetic construct
  misc_feature 1..24: note = Synthetic polynucleotide encoding artificial human antibody CDR-H2 region
  source 1..24: mol_type = other DNA
atatggtatgatggaagtaatgag

SEQ ID NO: 3523 - DNA, 24 bp, synthetic construct
  misc_feature 1..24: note = Synthetic polynucleotide encoding artificial human antibody CDR-H2 region
  source 1..24: mol_type = other DNA
atatggtatgatggaagtaataaa

SEQ ID NO: 3524-3676 - skipped (153 entries)

SEQ ID NO: 3677 - DNA, 21 bp, synthetic construct
  misc_feature 1..21: note = Synthetic polynucleotide encoding artificial human antibody CDR-L2 region
  source 1..21: mol_type = other DNA
cttaacagtgatggcagccac

SEQ ID NO: 3678-3790 - skipped (113 entries)

SEQ ID NO: 3791 - DNA, 21 bp, synthetic construct
  misc_feature 1..21: note = Synthetic polynucleotide encoding artificial human antibody CDR-L2 region
  source 1..21: mol_type = other DNA
cagtactcagactcagataag

SEQ ID NO: 3792-3794 - skipped (3 entries)

SEQ ID NO: 3795 - DNA, 42 bp, synthetic construct
  misc_feature 1..42: note = Synthetic polynucleotide encoding artificial human antibody CDR-H3 region
  source 1..42: mol_type = other DNA
gcgagggttacccttgggagttacttttacggcatggacgtc

SEQ ID NO: 3796 - DNA, 45 bp, synthetic construct
  misc_feature 1..45: note = Synthetic polynucleotide encoding artificial human antibody CDR-H3 region
  source 1..45: mol_type = other DNA
gcgagagatgggggatcagggagttacttcgactgctttgactac

SEQ ID NO: 3797 - DNA, 54 bp, synthetic construct
  misc_feature 1..54: note = Synthetic polynucleotide encoding artificial human antibody CDR-H3 region
  source 1..54: mol_type = other DNA
gcaaaagatataaacttttttgggttagggacagggggaggtgctatggacgtc

SEQ ID NO: 3798 - DNA, 33 bp, synthetic construct
  misc_feature 1..33: note = Synthetic polynucleotide encoding artificial human antibody CDR-H3 region
  source 1..33: mol_type = other DNA
gcacacagagcaatagtaggactctttgactac

SEQ ID NO: 3799 - DNA, 42 bp, synthetic construct
  misc_feature 1..42: note = Synthetic polynucleotide encoding artificial human antibody CDR-H3 region
  source 1..42: mol_type = other DNA
gcgcgaggaggggatgggggaccccaagatgcttttgatatc

SEQ ID NO: 3800 - DNA, 51 bp, synthetic construct
  misc_feature 1..51: note = Synthetic polynucleotide encoding artificial human antibody CDR-H3 region
  source 1..51: mol_type = other DNA
gtgaagtcattttcggctgaatattactactattactacggtatggacgtc

SEQ ID NO: 3801 - DNA, 45 bp, synthetic construct
  misc_feature 1..45: note = Synthetic polynucleotide encoding artificial human antibody CDR-H3 region
  source 1..45: mol_type = other DNA
gcgagagttgttccaggtgactccgtctatggtgcttttgatatc

SEQ ID NO: 3802 - DNA, 39 bp, synthetic construct
  misc_feature 1..39: note = Synthetic polynucleotide encoding artificial human antibody CDR-H3 region
  source 1..39: mol_type = other DNA
gcaaagcggaccccgttcggggagtgggcatttgactac

SEQ ID NO: 3803 - DNA, 51 bp, synthetic construct
  misc_feature 1..51: note = Synthetic polynucleotide encoding artificial human antibody CDR-H3 region
  source 1..51: mol_type = other DNA
gcgaaagatccggggacctttagggaccatctttggagtggtgttgactac

SEQ ID NO: 3804 - DNA, 48 bp, synthetic construct
  misc_feature 1..48: note = Synthetic polynucleotide encoding artificial human antibody CDR-H3 region
  source 1..48: mol_type = other DNA
gcaaaagcggcggctacactcccctacttccgcttcgctatggacgtc

SEQ ID NO: 3805 - DNA, 51 bp, synthetic construct
  misc_feature 1..51: note = Synthetic polynucleotide encoding artificial human antibody CDR-H3 region
  source 1..51: mol_type = other DNA
gcgagagtgggagtctttaagggcctggctcctttcggggggttcgacccc

SEQ ID NO: 3806 - DNA, 33 bp, synthetic construct
  misc_feature 1..33: note = Synthetic polynucleotide encoding artificial human antibody CDR-H3 region
  source 1..33: mol_type = other DNA
gcgagagacagtggtggcactccggggccctac

SEQ ID NO: 3807 - DNA, 48 bp, synthetic construct
  misc_feature 1..48: note = Synthetic polynucleotide encoding artificial human antibody CDR-H3 region
  source 1..48: mol_type = other DNA
gtgaggtcgttcgtcggcgcagttcccgcttatcccaactttgacttc

SEQ ID NO: 3808 - DNA, 33 bp, synthetic construct
  misc_feature 1..33: note = Synthetic polynucleotide encoding artificial human antibody CDR-H3 region
  source 1..33: mol_type = other DNA
gtaagaggggtagtgggggctactctcgacaac

SEQ ID NO: 3809 - DNA, 51 bp, synthetic construct
  misc_feature 1..51: note = Synthetic polynucleotide encoding artificial human antibody CDR-H3 region
  source 1..51: mol_type = other DNA
gtgaaagattcccgggttacggggcaaagcagtggttatatctttgactct

SEQ ID NO: 3810 - DNA, 33 bp, synthetic construct
  misc_feature 1..33: note = Synthetic polynucleotide encoding artificial human antibody CDR-H3 region
  source 1..33: mol_type = other DNA
gcgagaccccgtttaggctggtacttcgatctc

SEQ ID NO: 3811 - DNA, 39 bp, synthetic construct
  misc_feature 1..39: note = Synthetic polynucleotide encoding artificial human antibody CDR-H3 region
  source 1..39: mol_type = other DNA
gcgagagaaaccgccgggcagctcatcccctttgactac

SEQ ID NO: 3812 - DNA, 51 bp, synthetic construct
  misc_feature 1..51: note = Synthetic polynucleotide encoding artificial human antibody CDR-H3 region
  source 1..51: mol_type = other DNA
gcgagagattatatgggtgtggatttctactactactacggtatggacgtc

SEQ ID NO: 3813 - DNA, 42 bp, synthetic construct
  misc_feature 1..42: note = Synthetic polynucleotide encoding artificial human antibody CDR-H3 region
  source 1..42: mol_type = other DNA
gcgagagatatagcagtggctattactaactactttggctcc

SEQ ID NO: 3814 - DNA, 33 bp, synthetic construct
  misc_feature 1..33: note = Synthetic polynucleotide encoding artificial human antibody CDR-H3 region
  source 1..33: mol_type = other DNA
gcgagagaacatcgtagtgggtatcagcgatac

SEQ ID NO: 3815 - DNA, 33 bp, synthetic construct
  misc_feature 1..33: note = Synthetic polynucleotide encoding artificial human antibody CDR-H3 region
  source 1..33: mol_type = other DNA
gcacacttctctacggtgattaactttggccac

SEQ ID NO: 3816 - DNA, 33 bp, synthetic construct
  misc_feature 1..33: note = Synthetic polynucleotide encoding artificial human antibody CDR-H3 region
  source 1..33: mol_type = other DNA
gcgtgccgacggatatatcaggggttcgacccc

SEQ ID NO: 3817 - DNA, 30 bp, synthetic construct
  misc_feature 1..30: note = Synthetic polynucleotide encoding artificial human antibody CDR-H3 region
  source 1..30: mol_type = other DNA
gcgagagatcgagctacctcgtttgattac

SEQ ID NO: 3818 - DNA, 27 bp, synthetic construct
  misc_feature 1..27: note = Synthetic polynucleotide encoding artificial human antibody CDR-H3 region
  source 1..27: mol_type = other DNA
gcgagaggtcggggggaaatggacgtc

SEQ ID NO: 3819 - DNA, 42 bp, synthetic construct
  misc_feature 1..42: note = Synthetic polynucleotide encoding artificial human antibody CDR-H3 region
  source 1..42: mol_type = other DNA
gcgactacccctagcagcagctggtactggtacttcgacccc

SEQ ID NO: 3820 - DNA, 48 bp, synthetic construct
  misc_feature 1..48: note = Synthetic polynucleotide encoding artificial human antibody CDR-H3 region
  source 1..48: mol_type = other DNA
gcgagagatcttgaacttattattgcagcaggtgctccccttgaccac

SEQ ID NO: 3821 - DNA, 48 bp, synthetic construct
  misc_feature 1..48: note = Synthetic polynucleotide encoding artificial human antibody CDR-H3 region
  source 1..48: mol_type = other DNA
gcgagactggtaacatcacctgaagaagggggtccctggttcgacccc

SEQ ID NO: 3822 - DNA, 36 bp, synthetic construct
  misc_feature 1..36: note = Synthetic polynucleotide encoding artificial human antibody CDR-H3 region
  source 1..36: mol_type = other DNA
gcgagagatacggaagtggggcatcactttgactac

SEQ ID NO: 3823 - DNA, 33 bp, synthetic construct
  misc_feature 1..33: note = Synthetic polynucleotide encoding artificial human antibody CDR-H3 region
  source 1..33: mol_type = other DNA
gcgaagccctggagaagtgatggttttgatgtc

SEQ ID NO: 3824 - DNA, 33 bp, synthetic construct
  misc_feature 1..33: note = Synthetic polynucleotide encoding artificial human antibody CDR-H3 region
  source 1..33: mol_type = other DNA
gcagtgggcatggttacagatggttttgaaatc

SEQ ID NO: 3825 - DNA, 36 bp, synthetic construct
  misc_feature 1..36: note = Synthetic polynucleotide encoding artificial human antibody CDR-H3 region
  source 1..36: mol_type = other DNA
gccaggctggatttgcggaccgtgaggttcgacccc

SEQ ID NO: 3826 - DNA, 42 bp, synthetic construct
  misc_feature 1..42: note = Synthetic polynucleotide encoding artificial human antibody CDR-H3 region
  source 1..42: mol_type = other DNA
gcgagacatagcagtggccccccccggctcgcttttgatatc

SEQ ID NO: 3827 - DNA, 39 bp, synthetic construct
  misc_feature 1..39: note = Synthetic polynucleotide encoding artificial human antibody CDR-H3 region
  source 1..39: mol_type = other DNA
gcgaaagatttcgctatgcctacagtaactacggactac

SEQ ID NO: 3828 - DNA, 39 bp, synthetic construct
  misc_feature 1..39: note = Synthetic polynucleotide encoding artificial human antibody CDR-H3 region
  source 1..39: mol_type = other DNA
gtacacagaccatccctggcctattggtacttcgatgtc

SEQ ID NO: 3829 - DNA, 42 bp, synthetic construct
  misc_feature 1..42: note = Synthetic polynucleotide encoding artificial human antibody CDR-H3 region
  source 1..42: mol_type = other DNA
gtgagagagggtgattcacggaaatattatagtcttgactat

SEQ ID NO: 3830 - DNA, 39 bp, synthetic construct
  misc_feature 1..39: note = Synthetic polynucleotide encoding artificial human antibody CDR-H3 region
  source 1..39: mol_type = other DNA
gcgagagatccaatgtgggtctcttatgcttttgatatc

SEQ ID NO: 3831 - DNA, 27 bp, synthetic construct
  misc_feature 1..27: note = Synthetic polynucleotide encoding artificial human antibody CDR-H3 region
  source 1..27: mol_type = other DNA
gcgagtggttatgtttctttcgatctc

SEQ ID NO: 3832 - DNA, 48 bp, synthetic construct
  misc_feature 1..48: note = Synthetic polynucleotide encoding artificial human antibody CDR-H3 region
  source 1..48: mol_type = other DNA
gcgagagagggggcctatgagagtagtggacctgatccttttgatatc

SEQ ID NO: 3833 - DNA, 45 bp, synthetic construct
  misc_feature 1..45: note = Synthetic polynucleotide encoding artificial human antibody CDR-H3 region
  source 1..45: mol_type = other DNA
gcgagcctctttctaacatactatggttcggggacttattatcgc

SEQ ID NO: 3834 - DNA, 33 bp, synthetic construct
  misc_feature 1..33: note = Synthetic polynucleotide encoding artificial human antibody CDR-H3 region
  source 1..33: mol_type = other DNA
gcgaaatcgaccctcggtggtggttttgacttc

SEQ ID NO: 3835 - DNA, 54 bp, synthetic construct
  misc_feature 1..54: note = Synthetic polynucleotide encoding artificial human antibody CDR-H3 region
  source 1..54: mol_type = other DNA
gcgagagttggtagcagcagctggtacagctccgggcgatccccttttgactac

SEQ ID NO: 3836 - DNA, 48 bp, synthetic construct
  misc_feature 1..48: note = Synthetic polynucleotide encoding artificial human antibody CDR-H3 region
  source 1..48: mol_type = other DNA
gcgaaagatcaaatcgtcctagagatggctacaagcccctttgactac

SEQ ID NO: 3837 - DNA, 51 bp, synthetic construct
  misc_feature 1..51: note = Synthetic polynucleotide encoding artificial human antibody CDR-H3 region
  source 1..51: mol_type = other DNA
gcgagagatctcagttgtagtagtaccagctgccatgatgcttttgatatc

SEQ ID NO: 3838 - DNA, 48 bp, synthetic construct
  misc_feature 1..48: note = Synthetic polynucleotide encoding artificial human antibody CDR-H3 region
  source 1..48: mol_type = other DNA
gcgagaggacccaatttccatgagagtatacgtgatggctttgatatc

SEQ ID NO: 3839 - DNA, 36 bp, synthetic construct
  misc_feature 1..36: note = Synthetic polynucleotide encoding artificial human antibody CDR-H3 region
  source 1..36: mol_type = other DNA
gcaagagttaactggaattccgatacctttgactcc

SEQ ID NO: 3840 - DNA, 60 bp, synthetic construct
  misc_feature 1..60: note = Synthetic polynucleotide encoding artificial human antibody CDR-H3 region
  source 1..60: mol_type = other DNA
gcgagagatccggggagagatccgtatttggacttggactatcactacggcatggacgtc

SEQ ID NO: 3841 - DNA, 48 bp, synthetic construct
  misc_feature 1..48: note = Synthetic polynucleotide encoding artificial human antibody CDR-H3 region
  source 1..48: mol_type = other DNA
gcgagagataagaggagcggtatgacttccgacagacgaattgactac

SEQ ID NO: 3842 - DNA, 36 bp, synthetic construct
  misc_feature 1..36: note = Synthetic polynucleotide encoding artificial human antibody CDR-H3 region
  source 1..36: mol_type = other DNA
tcggggggctattactcctcctcccacatggacgtc

SEQ ID NO: 3843 - DNA, 39 bp, synthetic construct
  misc_feature 1..39: note = Synthetic polynucleotide encoding artificial human antibody CDR-H3 region
  source 1..39: mol_type = other DNA
gcgagagtgaatatagcagcagctggtactcttgactac

SEQ ID NO: 3844 - DNA, 63 bp, synthetic construct
  misc_feature 1..63: note = Synthetic polynucleotide encoding artificial human antibody CDR-H3 region
  source 1..63: mol_type = other DNA
gtaaaagatatggggcctgctggaactgcttcggcttatcactaccacaatggaatggacgtc

SEQ ID NO: 3845 - DNA, 36 bp, synthetic construct
  misc_feature 1..36: note = Synthetic polynucleotide encoding artificial human antibody CDR-H3 region
  source 1..36: mol_type = other DNA
gcgagactaactactagtaccagcgcgctgagctac

SEQ ID NO: 3846 - DNA, 48 bp, synthetic construct
  misc_feature 1..48: note = Synthetic polynucleotide encoding artificial human antibody CDR-H3 region
  source 1..48: mol_type = other DNA
gcgagagagaactggaactccgctggaactacggagtggttcgacccc

SEQ ID NO: 3847 - DNA, 30 bp, synthetic construct
  misc_feature 1..30: note = Synthetic polynucleotide encoding artificial human antibody CDR-H3 region
  source 1..30: mol_type = other DNA
gcgagagatactctacaaaagggggactac

SEQ ID NO: 3848 - DNA, 57 bp, synthetic construct
  misc_feature 1..57: note = Synthetic polynucleotide encoding artificial human antibody CDR-H3 region
  source 1..57: mol_type = other DNA
gcgagagcctcccgcgttctagaaagtaagagctggcacggggatgcttttgatgtc

SEQ ID NO: 3849 - DNA, 39 bp, synthetic construct
  misc_feature 1..39: note = Synthetic polynucleotide encoding artificial human antibody CDR-H3 region
  source 1..39: mol_type = other DNA
gcgaggggtcttggcggtagtggttattattttgactac

SEQ ID NO: 3850 - DNA, 51 bp, synthetic construct
  misc_feature 1..51: note = Synthetic polynucleotide encoding artificial human antibody CDR-H3 region
  source 1..51: mol_type = other DNA
gcgagacaggcattttgtggtgctaattgctggtcgggcgcttatgatatc

SEQ ID NO: 3851 - DNA, 57 bp, synthetic construct
  misc_feature 1..57: note = Synthetic polynucleotide encoding artificial human antibody CDR-H3 region
  source 1..57: mol_type = other DNA
gtgagaaggggggcgactgtatttcagggaaagataattaaaggctacatggacgtc

SEQ ID NO: 3852 - DNA, 30 bp, synthetic construct
  misc_feature 1..30: note = Synthetic polynucleotide encoding artificial human antibody CDR-H3 region
  source 1..30: mol_type = other DNA
gcgaaagtgaagggggggtccaatgactac

SEQ ID NO: 3853 - DNA, 39 bp, synthetic construct
  misc_feature 1..39: note = Synthetic polynucleotide encoding artificial human antibody CDR-H3 region
  source 1..39: mol_type = other DNA
gcgagacacctctacggtgacttttactacttagactac

SEQ ID NO: 3854 - DNA, 39 bp, synthetic construct
  misc_feature 1..39: note = Synthetic polynucleotide encoding artificial human antibody CDR-H3 region
  source 1..39: mol_type = other DNA
gcgagagaccatcgtacggggagttattatcccgactac

SEQ ID NO: 3855 - DNA, 45 bp, synthetic construct
  misc_feature 1..45: note = Synthetic polynucleotide encoding artificial human antibody CDR-H3 region
  source 1..45: mol_type = other DNA
gcgagaggggtgaggcagcagcaggttcggaagtggttcgacccc

SEQ ID NO: 3856 - DNA, 36 bp, synthetic construct
  misc_feature 1..36: note = Synthetic polynucleotide encoding artificial human antibody CDR-H3 region
  source 1..36: mol_type = other DNA
gcgatggataattcggggagcgggggcgttgactac

SEQ ID NO: 3857 - DNA, 36 bp, synthetic construct
  misc_feature 1..36: note = Synthetic polynucleotide encoding artificial human antibody CDR-H3 region
  source 1..36: mol_type = other DNA
gcgagagatagttatcactactacggtatggacgtc

SEQ ID NO: 3858 - DNA, 48 bp, synthetic construct
  misc_feature 1..48: note = Synthetic polynucleotide encoding artificial human antibody CDR-H3 region
  source 1..48: mol_type = other DNA
gcaagagagaccgtttacatctctacttactactacggtttggacgtc

SEQ ID NO: 3859 - DNA, 39 bp, synthetic construct
  misc_feature 1..39: note = Synthetic polynucleotide encoding artificial human antibody CDR-H3 region
  source 1..39: mol_type = other DNA
gcaacagatgggcccttacatacgtcgggacttgactac

SEQ ID NO: 3860 - DNA, 39 bp, synthetic construct
  misc_feature 1..39: note = Synthetic polynucleotide encoding artificial human antibody CDR-H3 region
  source 1..39: mol_type = other DNA
gcgtgcttgggggctgaggcgaacgatgcttttgatatc

SEQ ID NO: 3861 - DNA, 21 bp, synthetic construct
  misc_feature 1..21: note = Synthetic polynucleotide encoding artificial human antibody CDR-H3 region
  source 1..21: mol_type = other DNA
gcgaaagtccctggggactac

SEQ ID NO: 3862 - DNA, 45 bp, synthetic construct
  misc_feature 1..45: note = Synthetic polynucleotide encoding artificial human antibody CDR-H3 region
  source 1..45: mol_type = other DNA
gcgagagcgggccttagtaccagttggccgagctggttcgacccc

SEQ ID NO: 3863 - DNA, 42 bp, synthetic construct
  misc_feature 1..42: note = Synthetic polynucleotide encoding artificial human antibody CDR-H3 region
  source 1..42: mol_type = other DNA
gcgagaaacgatatttccttcaaacagagtgctatcgacgtc

SEQ ID NO: 3864 - DNA, 51 bp, synthetic construct
  misc_feature 1..51: note = Synthetic polynucleotide encoding artificial human antibody CDR-H3 region
  source 1..51: mol_type = other DNA
gcgaaaacgaagactatgggtgtggggggagagtatttcggcttggacgtc

SEQ ID NO: 3865 - DNA, 48 bp, synthetic construct
  misc_feature 1..48: note = Synthetic polynucleotide encoding artificial human antibody CDR-H3 region
  source 1..48: mol_type = other DNA
gcgagacacaaggccctctggttcggggaggcaggggcttttgatatc

SEQ ID NO: 3866 - DNA, 54 bp, synthetic construct
  misc_feature 1..54: note = Synthetic polynucleotide encoding artificial human antibody CDR-H3 region
  source 1..54: mol_type = other DNA
gcaaaagatttgttagggttcagggaccaaaggaactactacggtatggacgtc

SEQ ID NO: 3867 - DNA, 39 bp, synthetic construct
  misc_feature 1..39: note = Synthetic polynucleotide encoding artificial human antibody CDR-H3 region
  source 1..39: mol_type = other DNA
gcgagaagcttctacgacacccttttctactttgagaac

SEQ ID NO: 3868 - DNA, 36 bp, synthetic construct
  misc_feature 1..36: note = Synthetic polynucleotide encoding artificial human antibody CDR-H3 region
  source 1..36: mol_type = other DNA
gcacgcgtttatagtaccaagtgggactttgactac

SEQ ID NO: 3869 - DNA, 33 bp, synthetic construct
  misc_feature 1..33: note = Synthetic polynucleotide encoding artificial human antibody CDR-H3 region
  source 1..33: mol_type = other DNA
gcgaaagggggccctttacgtccttttgatatc

SEQ ID NO: 3870 - DNA, 45 bp, synthetic construct
  misc_feature 1..45: note = Synthetic polynucleotide encoding artificial human antibody CDR-H3 region
  source 1..45: mol_type = other DNA
gcgagacttagtagagacggctacaccattgagcactttgactac

SEQ ID NO: 3871 - DNA, 57 bp, synthetic construct
  misc_feature 1..57: note = Synthetic polynucleotide encoding artificial human antibody CDR-H3 region
  source 1..57: mol_type = other DNA
gcgagacgcggggttagtggtgggagcgcctggacgtattacaactttttcgacccc

SEQ ID NO: 3872 - DNA, 42 bp, synthetic construct
  misc_feature 1..42: note = Synthetic polynucleotide encoding artificial human antibody CDR-H3 region
  source 1..42: mol_type = other DNA
gcgagagaacttcccgtgattggtagacgtacttttgatatc

SEQ ID NO: 3873 - DNA, 66 bp, synthetic construct
  misc_feature 1..66: note = Synthetic polynucleotide encoding artificial human antibody CDR-H3 region
  source 1..66: mol_type = other DNA
gcgagagattccgaggtggaaaagagtgatgggtacatggcctcgaccgctgaatacttccaactc

SEQ ID NO: 3874 - DNA, 45 bp, synthetic construct
  misc_feature 1..45: note = Synthetic polynucleotide encoding artificial human antibody CDR-H3 region
  source 1..45: mol_type = other DNA
gtaaaagcaggtgtcccgtgggaggtccagcgatggttcgacccc

SEQ ID NO: 3875 - DNA, 36 bp, synthetic construct
  misc_feature 1..36: note = Synthetic polynucleotide encoding artificial human antibody CDR-H3 region
  source 1..36: mol_type = other DNA
gcgagagatcgtcagggcctaggccgtatggacgtc

SEQ ID NO: 3876 - DNA, 36 bp, synthetic construct
  misc_feature 1..36: note = Synthetic polynucleotide encoding artificial human antibody CDR-H3 region
  source 1..36: mol_type = other DNA
gcgagggaactgggtgcgaactactactttgcctat

SEQ ID NO: 3877 - DNA, 45 bp, synthetic construct
  misc_feature 1..45: note = Synthetic polynucleotide encoding artificial human antibody CDR-H3 region
  source 1..45: mol_type = other DNA
gcgagggaagtcgatatacgtggagacagcgatgcttttgatatt

SEQ ID NO: 3878 - DNA, 30 bp, synthetic construct
  misc_feature 1..30: note = Synthetic polynucleotide encoding artificial human antibody CDR-H3 region
  source 1..30: mol_type = other DNA
gcgactacccgaaactcagctttcctcaac

SEQ ID NO: 3879 - DNA, 42 bp, synthetic construct
  misc_feature 1..42: note = Synthetic polynucleotide encoding artificial human antibody CDR-H3 region
  source 1..42: mol_type = other DNA
gcgaagtccgcatttgggggagttcctgatggttttgatatc

SEQ ID NO: 3880 - DNA, 21 bp, synthetic construct
  misc_feature 1..21: note = Synthetic polynucleotide encoding artificial human antibody CDR-H3 region
  source 1..21: mol_type = other DNA
gcgagagatgggtttgactac

SEQ ID NO: 3881 - DNA, 39 bp, synthetic construct
  misc_feature 1..39: note = Synthetic polynucleotide encoding artificial human antibody CDR-H3 region
  source 1..39: mol_type = other DNA
gcaaaagcgggatacagctttactaccgctcctgactac

SEQ ID NO: 3882 - DNA, 42 bp, synthetic construct
  misc_feature 1..42: note = Synthetic polynucleotide encoding artificial human antibody CDR-H3 region
  source 1..42: mol_type = other DNA
gcgcgagagagaggccaggtccgttcctacggcatggacgtc

SEQ ID NO: 3883 - DNA, 57 bp, synthetic construct
  misc_feature 1..57: note = Synthetic polynucleotide encoding artificial human antibody CDR-H3 region
  source 1..57: mol_type = other DNA
gtaaaaattggcggggatgggacagcctacgcttggacctttaggcactttgactcc

SEQ ID NO: 3884 - DNA, 39 bp, synthetic construct
  misc_feature 1..39: note = Synthetic polynucleotide encoding artificial human antibody CDR-H3 region
  source 1..39: mol_type = other DNA
gcgagagggttgggtggagattggaactaccttgcctac

SEQ ID NO: 3885 - DNA, 63 bp, synthetic construct
  misc_feature 1..63: note = Synthetic polynucleotide encoding artificial human antibody CDR-H3 region
  source 1..63: mol_type = other DNA
gcgaaagaaggtggatgggggaatacagtaactacgtcctactactactacggtatggatgtc

SEQ ID NO: 3886 - DNA, 42 bp, synthetic construct
  misc_feature 1..42: note = Synthetic polynucleotide encoding artificial human antibody CDR-H3 region
  source 1..42: mol_type = other DNA
acgagggatgggggatacttcgcaactggcgagtttgactac

SEQ ID NO: 3887 - DNA, 36 bp, synthetic construct
  misc_feature 1..36: note = Synthetic polynucleotide encoding artificial human antibody CDR-H3 region
  source 1..36: mol_type = other DNA
gcgagagagcgctttggccaaggtgcccttgactac

SEQ ID NO: 3888 - DNA, 45 bp, synthetic construct
  misc_feature 1..45: note = Synthetic polynucleotide encoding artificial human antibody CDR-H3 region
  source 1..45: mol_type = other DNA
gcgaccatcgtcgctgcctacagctatggtttcgagttcgacccc

SEQ ID NO: 3889 - DNA, 63 bp, synthetic construct; identical to SEQ ID NO: 3885
  misc_feature 1..63: note = Synthetic polynucleotide encoding artificial human antibody CDR-H3 region
  source 1..63: mol_type = other DNA

SEQ ID NO: 3890 - DNA, 45 bp, synthetic construct
  misc_feature 1..45: note = Synthetic polynucleotide encoding artificial human antibody CDR-H3 region
  source 1..45: mol_type = other DNA
gcgcgacagggatttgaggctctggttattcgaggctttgactac

SEQ ID NO: 3891 - DNA, 45 bp, synthetic construct
  misc_feature 1..45: note = Synthetic polynucleotide encoding artificial human antibody CDR-H3 region
  source 1..45: mol_type = other DNA
gcgaggagatctaccagtagcccctctttcagcactctggacgtc

SEQ ID NO: 3892 - DNA, 30 bp, synthetic construct
  misc_feature 1..30: note = Synthetic polynucleotide encoding artificial human antibody CDR-H3 region
  source 1..30: mol_type = other DNA
gcgagacaaatggtgactacgaggggctac

SEQ ID NO: 3893 - DNA, 48 bp, synthetic construct
  misc_feature 1..48: note = Synthetic polynucleotide encoding artificial human antibody CDR-H3 region
  source 1..48: mol_type = other DNA
gcgagagtcccatctcgctatggccgttccaggggcgcttttgatatc

SEQ ID NO: 3894 - DNA, 36 bp, synthetic construct
  misc_feature 1..36: note = Synthetic polynucleotide encoding artificial human antibody CDR-H3 region
  source 1..36: mol_type = other DNA
gcgagaaatctttatcgtctgggctggttcgacccc

SEQ ID NO: 3895 - DNA, 39 bp, synthetic construct
  misc_feature 1..39: note = Synthetic polynucleotide encoding artificial human antibody CDR-H3 region
  source 1..39: mol_type = other DNA
gcgaaatcgaaaggtaactaccgggacgctatggacgtc

SEQ ID NO: 3896 - DNA, 42 bp, synthetic construct
  misc_feature 1..42: note = Synthetic polynucleotide encoding artificial human antibody CDR-H3 region
  source 1..42: mol_type = other DNA
gcgacctcatatacagtaacgactttctacggtatggacgtc

SEQ ID NO: 3897 - DNA, 36 bp, synthetic construct
  misc_feature 1..36: note = Synthetic polynucleotide encoding artificial human antibody CDR-H3 region
  source 1..36: mol_type = other DNA
gccagaggggcggccttctactacggtatggacgtc

SEQ ID NO: 3898 - DNA, 45 bp, synthetic construct
  misc_feature 1..45: note = Synthetic polynucleotide encoding artificial human antibody CDR-H3 region
  source 1..45: mol_type = other DNA
gcgagagatacctacggtgacccgaggggtgactactttgactac

SEQ ID NO: 3899 - DNA, 51 bp, synthetic construct
  misc_feature 1..51: note = Synthetic polynucleotide encoding artificial human antibody CDR-H3 region
  source 1..51: mol_type = other DNA
gcgagactgtggggtagcggtgactggtggccctccctgtattttgactcc

SEQ ID NO: 3900 - DNA, 39 bp, synthetic construct
  misc_feature 1..39: note = Synthetic polynucleotide encoding artificial human antibody CDR-H3 region
  source 1..39: mol_type = other DNA
gcgagaatccggcgtatagcagcaactagttttgactac

SEQ ID NO: 3901 - DNA, 48 bp, synthetic construct
  misc_feature 1..48: note = Synthetic polynucleotide encoding artificial human antibody CDR-H3 region
  source 1..48: mol_type = other DNA
gcaaaaatagcacgtcgtcctcccagtttttacgactacatggacgtc

SEQ ID NO: 3902 - DNA, 48 bp, synthetic construct
  misc_feature 1..48: note = Synthetic polynucleotide encoding artificial human antibody CDR-H3 region
  source 1..48: mol_type = other DNA
gcgaggtcgacaagtagttccacctccgacttccactacatggacgta

SEQ ID NO: 3903 - DNA, 30 bp, synthetic construct
  misc_feature 1..30: note = Synthetic polynucleotide encoding artificial human antibody CDR-H3 region
  source 1..30: mol_type = other DNA
acaagaggatgggcattcaccagctccgac

SEQ ID NO: 3904 - DNA, 24 bp, synthetic construct
  misc_feature 1..24: note = Synthetic polynucleotide encoding artificial human antibody CDR-H3 region
  source 1..24: mol_type = other DNA
gcaggaggatgggcccttggctac

SEQ ID NO: 3905 - DNA, 30 bp, synthetic construct
  misc_feature 1..30: note = Synthetic polynucleotide encoding artificial human antibody CDR-H3 region
  source 1..30: mol_type = other DNA
gcgagacaccgaattttcggtttggacgtc

SEQ ID NO: 3906 - DNA, 57 bp, synthetic construct
  misc_feature 1..57: note = Synthetic polynucleotide encoding artificial human antibody CDR-H3 region
  source 1..57: mol_type = other DNA
gcgagacgcggaccgaccgatacatggtcaggggaagttggctactactttgactac

SEQ ID NO: 3907 - DNA, 48 bp, synthetic construct
  misc_feature 1..48: note = Synthetic polynucleotide encoding artificial human antibody CDR-H3 region
  source 1..48: mol_type = other DNA
gcgagagatggaaaaacattagggtacggtggtaactccgttgactac

SEQ ID NO: 3908 - DNA, 45 bp, synthetic construct
  misc_feature 1..45: note = Synthetic polynucleotide encoding artificial human antibody CDR-H3 region
  source 1..45: mol_type = other DNA
gctcggacagaaactaaatgggaggacagggggctttgggactac

SEQ ID NO: 3909 - DNA, 30 bp, synthetic construct
  misc_feature 1..30: note = Synthetic polynucleotide encoding artificial human antibody CDR-H3 region
  source 1..30: mol_type = other DNA
gcgagatcgttttatggttcaggtttgcag

SEQ ID NO: 3910 - DNA, 39 bp, synthetic construct
  misc_feature 1..39: note = Synthetic polynucleotide encoding artificial human antibody CDR-H3 region
  source 1..39: mol_type = other DNA
gcgagggccatgggtggctacacttactaccttgacgac

SEQ ID NO: 3911 - DNA, 51 bp, synthetic construct
  misc_feature 1..51: note = Synthetic polynucleotide encoding artificial human antibody CDR-H3 region
  source 1..51: mol_type = other DNA
gcgagggcggggaaagacggctacaattttttctactacggtatggacgtc

SEQ ID NO: 3912 - DNA, 45 bp, synthetic construct
  misc_feature 1..45: note = Synthetic polynucleotide encoding artificial human antibody CDR-H3 region
  source 1..45: mol_type = other DNA
gcgagagggatcatgactacagcaatttcctactactttgactac

SEQ ID NO: 3913 - DNA, 54 bp, synthetic construct
  misc_feature 1..54: note = Synthetic polynucleotide encoding artificial human antibody CDR-H3 region
  source 1..54: mol_type = other DNA
gcgaaaggagaaagggacctgacagactacggtgaccccgaatatttccagcac

SEQ ID NO: 3914 - DNA, 54 bp, synthetic construct
  misc_feature 1..54: note = Synthetic polynucleotide encoding artificial human antibody CDR-H3 region
  source 1..54: mol_type = other DNA
gcgaaagatctgcgatattgtagcgctcgtagtagttgttttggcattgacttc

SEQ ID NO: 3915 - DNA, 27 bp, synthetic construct
  misc_feature 1..27: note = Synthetic polynucleotide encoding artificial human antibody CDR-H3 region
  source 1..27: mol_type = other DNA
gcgagaagagcatacagctttgactac

SEQ ID NO: 3916 - DNA, 54 bp, synthetic construct
  misc_feature 1..54: note = Synthetic polynucleotide encoding artificial human antibody CDR-H3 region
  source 1..54: mol_type = other DNA
gcaagagagggggccccagatgactacggtgactccgggactgcttttgatatt

SEQ ID NO: 3917 - DNA, 36 bp, synthetic construct
  misc_feature 1..36: note = Synthetic polynucleotide encoding artificial human antibody CDR-H3 region
  source 1..36: mol_type = other DNA
accaccgatcacccctatggtgactactctgacaac

SEQ ID NO: 3918 - DNA, 30 bp, synthetic construct
  misc_feature 1..30: note = Synthetic polynucleotide encoding artificial human antibody CDR-H3 region
  source 1..30: mol_type = other DNA
gcgaaggaattattagggggttttgactat

SEQ ID NO: 3919 - DNA, 39 bp, synthetic construct
  misc_feature 1..39: note = Synthetic polynucleotide encoding artificial human antibody CDR-H3 region
  source 1..39: mol_type = other DNA
gcgagagtttttggatcagcagctggtgcttttgatatc

SEQ ID NO: 3920 - DNA, 36 bp, synthetic construct
  misc_feature 1..36: note = Synthetic polynucleotide encoding artificial human antibody CDR-H3 region
  source 1..36: mol_type = other DNA
gcgagacacgattggcgcttatacgcatttgactac

SEQ ID NO: 3921 - DNA, 27 bp, synthetic construct
  misc_feature 1..27: note = Synthetic polynucleotide encoding artificial human antibody CDR-H3 region
  source 1..27: mol_type = other DNA
gcaggaggggaaaccagtcctgactac

SEQ ID NO: 3922 - DNA, 45 bp, synthetic construct
  misc_feature 1..45: note = Synthetic polynucleotide encoding artificial human antibody CDR-H3 region
  source 1..45: mol_type = other DNA
gtgagtagggggcccctagggggagcagcagctggaccggactac

SEQ ID NO: 3923 - DNA, 30 bp, synthetic construct
  misc_feature 1..30: note = Synthetic polynucleotide encoding artificial human antibody CDR-H3 region
  source 1..30: mol_type = other DNA
gcgcgagatgtccgagggtggttcgtcccc

SEQ ID NO: 3924 - DNA, 57 bp, synthetic construct
  misc_feature 1..57: note = Synthetic polynucleotide encoding artificial human antibody CDR-H3 region
  source 1..57: mol_type = other DNA
gtgagagatcgcaacattgtatctgtgccaggtgctatcccctacggaatggacgtc

SEQ ID NO: 3925 - DNA, 27 bp, synthetic construct
  misc_feature 1..27: note = Synthetic polynucleotide encoding artificial human antibody CDR-H3 region
  source 1..27: mol_type = other DNA
gcaagagggagtgacacccttgactac

SEQ ID NO: 3926 - DNA, 36 bp, synthetic construct
  misc_feature 1..36: note = Synthetic polynucleotide encoding artificial human antibody CDR-H3 region
  source 1..36: mol_type = other DNA
gccagagtggggctaacttttgccttgttcgacccc

SEQ ID NO: 3927 - DNA, 51 bp, synthetic construct
  misc_feature 1..51: note = Synthetic polynucleotide encoding artificial human antibody CDR-H3 region
  source 1..51: mol_type = other DNA
gcgaacagtgcggggatacagctatggtcctcagacaactggttcgacccc

SEQ ID NO: 3928 - DNA, 30 bp, synthetic construct
  misc_feature 1..30: note = Synthetic polynucleotide encoding artificial human antibody CDR-H3 region
  source 1..30: mol_type = other DNA
gcgaaagagggcatagaactcatgatcctc

SEQ ID NO: 3929 - DNA, 42 bp, synthetic construct
  misc_feature 1..42: note = Synthetic polynucleotide encoding artificial human antibody CDR-H3 region
  source 1..42: mol_type = other DNA
gcgagaggcattaccctgactcggggagtctcctttgactac

SEQ ID NO: 3930 - DNA, 27 bp, synthetic construct
  misc_feature 1..27: note = Synthetic polynucleotide encoding artificial human antibody CDR-H3 region
  source 1..27: mol_type = other DNA
gccagagatgggggagcttttgatatc

SEQ ID NO: 3931 - DNA, 48 bp, synthetic construct
  misc_feature 1..48: note = Synthetic polynucleotide encoding artificial human antibody CDR-H3 region
  source 1..48: mol_type = other DNA
gcgagagatcggcttttcacagctattaacagtgggtactttgactac

SEQ ID NO: 3932 - DNA, 33 bp, synthetic construct
  misc_feature 1..33: note = Synthetic polynucleotide encoding artificial human antibody CDR-H3 region
  source 1..33: mol_type = other DNA
gcgagagaggggagctactacgggattggctac

SEQ ID NO: 3933 - DNA, 42 bp, synthetic construct
  misc_feature 1..42: note = Synthetic polynucleotide encoding artificial human antibody CDR-H3 region
  source 1..42: mol_type = other DNA
gcgagagatacggacagtggctggttggattcgtttgactac

SEQ ID NO: 3934 - DNA, 63 bp, synthetic construct
  misc_feature 1..63: note = Synthetic polynucleotide encoding artificial human antibody CDR-H3 region
  source 1..63: mol_type = other DNA
gcgacagatcaggggtgtgatgatggcagctgctatgtaggccactactacggaatggacgtc

SEQ ID NO: 3935 - DNA, 30 bp, synthetic construct
  misc_feature 1..30: note = Synthetic polynucleotide encoding artificial human antibody CDR-H3 region
  source 1..30: mol_type = other DNA
gggaggattatgactccctcgattgacctc

SEQ ID NO: 3936 - DNA, 39 bp, synthetic construct
  misc_feature 1..39: note = Synthetic polynucleotide encoding artificial human antibody CDR-H3 region
  source 1..39: mol_type = other DNA
gcgagagaaggacgggggggaggagacttctttgactac

SEQ ID NO: 3937 - DNA, 45 bp, synthetic construct
  misc_feature 1..45: note = Synthetic polynucleotide encoding artificial human antibody CDR-H3 region
  source 1..45: mol_type = other DNA
gcaaaagatggggacagtttgggggatttctctacttttgatatc

SEQ ID NO: 3938 - DNA, 36 bp, synthetic construct
  misc_feature 1..36: note = Synthetic polynucleotide encoding artificial human antibody CDR-H3 region
  source 1..36: mol_type = other DNA
gcaagagacggctatgactttcgggcttttgaccac

SEQ ID NO: 3939 - DNA, 60 bp, synthetic construct
  misc_feature 1..60: note = Synthetic polynucleotide encoding artificial human antibody CDR-H3 region
  source 1..60: mol_type = other DNA
gcgcgagctcgcggtgggggtttttgtagtaatatggactgcccggcaatgtttgactac

SEQ ID NO: 3940 - DNA, 27 bp, synthetic construct
  misc_feature 1..27: note = Synthetic polynucleotide encoding artificial human antibody CDR-H3 region
  source 1..27: mol_type = other DNA
accacgattcatgactacggtgaccac

SEQ ID NO: 3941 - DNA, 30 bp, synthetic construct
  misc_feature 1..30: note = Synthetic polynucleotide encoding artificial human antibody CDR-H3 region
  source 1..30: mol_type = other DNA
gcgaggggccttttacgatccctggacgtc

SEQ ID NO: 3942 - DNA, 42 bp, synthetic construct
  misc_feature 1..42: note = Synthetic polynucleotide encoding artificial human antibody CDR-H3 region
  source 1..42: mol_type = other DNA
gctagagtgaaactgggggcatcgagccgtgtttttgatgtc

SEQ ID NO: 3943 - DNA, 39 bp, synthetic construct
  misc_feature 1..39: note = Synthetic polynucleotide encoding artificial human antibody CDR-H3 region
  source 1..39: mol_type = other DNA
gcgacaaccgttacacctaaggtgaccagttttgcttcc

SEQ ID NO: 3944 - DNA, 45 bp, synthetic construct
  misc_feature 1..45: note = Synthetic polynucleotide encoding artificial human antibody CDR-H3 region
  source 1..45: mol_type = other DNA
gcgagagaacagagccccctttatttcggtccatctttggacgtc

SEQ ID NO: 3945 - DNA, 36 bp, synthetic construct
  misc_feature 1..36: note = Synthetic polynucleotide encoding artificial human antibody CDR-H3 region
  source 1..36: mol_type = other DNA
gcgagagagccttactcctcctacgctatggacgtc

SEQ ID NO: 3946 - DNA, 36 bp, synthetic construct
  misc_feature 1..36: note = Synthetic polynucleotide encoding artificial human antibody CDR-H3 region
  source 1..36: mol_type = other DNA
gcgaaagatggatccgagatgttattgtgtgactac

SEQ ID NO: 3947 - DNA, 33 bp, synthetic construct
  misc_feature 1..33: note = Synthetic polynucleotide encoding artificial human antibody CDR-H3 region
  source 1..33: mol_type = other DNA
gcgagagacactaggtggcgagggttggacagc

SEQ ID NO: 3948 - DNA, 39 bp, synthetic construct
  misc_feature 1..39: note = Synthetic polynucleotide encoding artificial human antibody CDR-H3 region
  source 1..39: mol_type = other DNA
gcaaaagatctgttagcagtgcctggcctacttgacgac

SEQ ID NO: 3949 - DNA, 42 bp, synthetic construct
  misc_feature 1..42: note = Synthetic polynucleotide encoding artificial human antibody CDR-H3 region
  source 1..42: mol_type = other DNA
gcgagtcggggtggatcttctcgccggtacggtatgggcgtc

SEQ ID NO: 3950 - DNA, 48 bp, synthetic construct
  misc_feature 1..48: note = Synthetic polynucleotide encoding artificial human antibody CDR-H3 region
  source 1..48: mol_type = other DNA
gtgaaattgaagggcattggcgctatgtggacgtacgctatggacgtc

SEQ ID NO: 3951 - DNA, 54 bp, synthetic construct
  misc_feature 1..54: note = Synthetic polynucleotide encoding artificial human antibody CDR-H3 region
  source 1..54: mol_type = other DNA
gcgagagatcagggctacggtgattacgactatcccagagactggatcgaaccc

SEQ ID NO: 3952 - DNA, 48 bp, synthetic construct
  misc_feature 1..48: note = Synthetic polynucleotide encoding artificial human antibody CDR-H3 region
  source 1..48: mol_type = other DNA
gcgagcgtccgagacctcgtcagtggcaccacttactactatcactac

SEQ ID NO: 3953 - DNA, 30 bp, synthetic construct
  misc_feature 1..30: note = Synthetic polynucleotide encoding artificial human antibody CDR-H3 region
  source 1..30: mol_type = other DNA
gcgagatacggtgactactcctttgacccc

SEQ ID NO: 3954 - DNA, 39 bp, synthetic construct
  misc_feature 1..39: note = Synthetic polynucleotide encoding artificial human antibody CDR-H3 region
  source 1..39: mol_type = other DNA
gcgagagtcgtagacacagttttggcagactttgactac

SEQ ID NO: 3955 - DNA, 42 bp, synthetic construct
  misc_feature 1..42: note = Synthetic polynucleotide encoding artificial human antibody CDR-H3 region
  source 1..42: mol_type = other DNA
gcgcgatcagggggctttggctggtcaagggaccttgactac

SEQ ID NO: 3956 - DNA, 48 bp, synthetic construct
  misc_feature 1..48: note = Synthetic polynucleotide encoding artificial human antibody CDR-H3 region
  source 1..48: mol_type = other DNA
gcgagacatggattttggagtggccccatacccgacgcttttgatatc

SEQ ID NO: 3957 - DNA, 36 bp, synthetic construct
  misc_feature 1..36: note = Synthetic polynucleotide encoding artificial human antibody CDR-H3 region
  source 1..36: mol_type = other DNA
gcgcacgaagactatggttcggggaatggtaattac

SEQ ID NO: 3958 - DNA, 45 bp, synthetic construct
  misc_feature 1..45: note = Synthetic polynucleotide encoding artificial human antibody CDR-H3 region
  source 1..45: mol_type = other DNA
gcgagagaccgcgacagtggctacgagaggaattgtctcgacccc

SEQ ID NO: 3959 - DNA, 66 bp, synthetic construct
  misc_feature 1..66: note = Synthetic polynucleotide encoding artificial human antibody CDR-H3 region
  source 1..66: mol_type = other DNA
gcgaggggggccccttatggttcgcgaatttattatgattacgactcctaccatggtatggacgtc

SEQ ID NO: 3960 - DNA, 48 bp, synthetic construct
  misc_feature 1..48: note = Synthetic polynucleotide encoding artificial human antibody CDR-H3 region
  source 1..48: mol_type = other DNA
gcgagaggaaagtttgactggttccctcgtgtgtcctcctttgactac

SEQ ID NO: 3961 - DNA, 39 bp, synthetic construct
  misc_feature 1..39: note = Synthetic polynucleotide encoding artificial human antibody CDR-H3 region
  source 1..39: mol_type = other DNA
gcggccgcctattatattgatactagcggctttgactac

SEQ ID NO: 3962 - DNA, 54 bp, synthetic construct
  misc_feature 1..54: note = Synthetic polynucleotide encoding artificial human antibody CDR-H3 region
  source 1..54: mol_type = other DNA
gcgaaaggacggacgtatagcaataactggttatttcactggtacttcgatctc

SEQ ID NO: 3963 - DNA, 39 bp, synthetic construct
  misc_feature 1..39: note = Synthetic polynucleotide encoding artificial human antibody CDR-H3 region
  source 1..39: mol_type = other DNA
gcgagagtttttagtacgatatttcatggggtcgacccc

SEQ ID NO: 3964 - DNA, 45 bp, synthetic construct
  misc_feature 1..45: note = Synthetic polynucleotide encoding artificial human antibody CDR-H3 region
  source 1..45: mol_type = other DNA
gcgagacacttaagcagtggcgaataccactacggtttggacgtc

SEQ ID NO: 3965 - DNA, 39 bp, synthetic construct
  misc_feature 1..39: note = Synthetic polynucleotide encoding artificial human antibody CDR-H3 region
  source 1..39: mol_type = other DNA
gcgaaaggaaagggtatagtgggagccacctttgactac

SEQ ID NO: 3966 - DNA, 54 bp, synthetic construct
  misc_feature 1..54: note = Synthetic polynucleotide encoding artificial human antibody CDR-H3 region
  source 1..54: mol_type = other DNA
gcgagagatgcgctagattttgactggttattgtcagccgggggctttgactac

SEQ ID NO: 3967 - DNA, 33 bp, synthetic construct
  misc_feature 1..33: note = Synthetic polynucleotide encoding artificial human antibody CDR-H3 region
  source 1..33: mol_type = other DNA
gcgagactacttgtggggggtgcttttgatatc

SEQ ID NO: 3968 - DNA, 54 bp, synthetic construct
  misc_feature 1..54: note = Synthetic polynucleotide encoding artificial human antibody CDR-H3 region
  source 1..54: mol_type = other DNA
accccaggatcttgtagtggtggtagctgctactccggcgatgcttttgatatc

SEQ ID NO: 3969 - DNA, 45 bp, synthetic construct
  misc_feature 1..45: note = Synthetic polynucleotide encoding artificial human antibody CDR-H3 region
  source 1..45: mol_type = other DNA
gcgagagagtcccttgatagtgcctcatatagtaccatcgcacat

SEQ ID NO: 3970 - DNA, 45 bp, synthetic construct
  misc_feature 1..45: note = Synthetic polynucleotide encoding artificial human antibody CDR-H3 region
  source 1..45: mol_type = other DNA
gcgagagatcgaggaggcaacagctggcttgatgtttttgatatg

SEQ ID NO: 3971 - DNA, 45 bp, synthetic construct
  misc_feature 1..45: note = Synthetic polynucleotide encoding artificial human antibody CDR-H3 region
  source 1..45: mol_type = other DNA
gcgagatcccccgccgcctttggctcagagagttactttgactcc

SEQ ID NO: 3972 - DNA, 51 bp, synthetic construct
  misc_feature 1..51: note = Synthetic polynucleotide encoding artificial human antibody CDR-H3 region
  source 1..51: mol_type = other DNA
gcgaaagatcttctagaggacccatacttcggggacttattgtttgactac

SEQ ID NO: 3973 - DNA, 36 bp, synthetic construct
  misc_feature 1..36: note = Synthetic polynucleotide encoding artificial human antibody CDR-H3 region
  source 1..36: mol_type = other DNA
gtgaggacccccgctgttggcaccgaccctgactac

SEQ ID NO: 3974 - DNA, 36 bp, synthetic construct
  misc_feature 1..36: note = Synthetic polynucleotide encoding artificial human antibody CDR-H3 region
  source 1..36: mol_type = other DNA
tcgagtggggggtccacatcgatggttgggagatac

SEQ ID NO: 3975 - DNA, 42 bp, synthetic construct
  misc_feature 1..42: note = Synthetic polynucleotide encoding artificial human antibody CDR-H3 region
  source 1..42: mol_type = other DNA
gcacggatgaccccattcaagtttggactatgccctgactac

SEQ ID NO: 3976 - DNA, 42 bp, synthetic construct
  misc_feature 1..42: note = Synthetic polynucleotide encoding artificial human antibody CDR-H3 region
  source 1..42: mol_type = other DNA
gcgagagtagtggtggtaggtacagactacggtatggacgtc

SEQ ID NO: 3977 - DNA, 42 bp, synthetic construct
  misc_feature 1..42: note = Synthetic polynucleotide encoding artificial human antibody CDR-H3 region
  source 1..42: mol_type = other DNA
gcgagagatcaaggactggagagggctaactggttcgacccc

SEQ ID NO: 3978 - DNA, 27 bp, synthetic construct
  misc_feature 1..27: note = Synthetic polynucleotide encoding artificial human antibody CDR-H3 region
  source 1..27: mol_type = other DNA
gcaagaggtgtccgccactttgactac

SEQ ID NO: 3979 - DNA, 36 bp, synthetic construct
  misc_feature 1..36: note = Synthetic polynucleotide encoding artificial human antibody CDR-H3 region
  source 1..36: mol_type = other DNA
gcgagagagtcacctttaactgtcgtctttgactac

SEQ ID NO: 3980 - DNA, 33 bp, synthetic construct
  misc_feature 1..33: note = Synthetic polynucleotide encoding artificial human antibody CDR-H3 region
  source 1..33: mol_type = other DNA
gcgagggaatcctcagcagctggttatgactac

SEQ ID NO: 3981 - DNA, 48 bp, synthetic construct
  misc_feature 1..48: note = Synthetic polynucleotide encoding artificial human antibody CDR-H3 region
  source 1..48: mol_type = other DNA
gcgagaaagcttatgtctggcatagtgtctcggggctggttcgacccc

SEQ ID NO: 3982 - DNA, 42 bp, synthetic construct
  misc_feature 1..42: note = Synthetic polynucleotide encoding artificial human antibody CDR-H3 region
  source 1..42: mol_type = other DNA
gcgagagatcgcggtgactacgttacccactggttcgacccc

SEQ ID NO: 3983 - DNA, 39 bp, synthetic construct
  misc_feature 1..39: note = Synthetic polynucleotide encoding artificial human antibody CDR-H3 region
  source 1..39: mol_type = other DNA
gcgagacatagggttggcgacagcccgggactccactac

SEQ ID NO: 3984 - DNA, 36 bp, synthetic construct
  misc_feature 1..36: note = Synthetic polynucleotide encoding artificial human antibody CDR-H3 region
  source 1..36: mol_type = other DNA
gcgagccctatagcagtggctgccccctttgcctac

SEQ ID NO: 3985 - DNA, 51 bp, synthetic construct
  misc_feature 1..51: note = Synthetic polynucleotide encoding artificial human antibody CDR-H3 region
  source 1..51: mol_type = other DNA
gtgaaggattatcttgctgttggtgggacctactacgactactttgactac

SEQ ID NO: 3986 - DNA, 33 bp, synthetic construct
  misc_feature 1..33: note = Synthetic polynucleotide encoding artificial human antibody CDR-H3 region
  source 1..33: mol_type = other DNA
gcgagacatgactaccgtaactactttgactac

SEQ ID NO: 3987 - DNA, 45 bp, synthetic construct
  misc_feature 1..45: note = Synthetic polynucleotide encoding artificial human antibody CDR-H3 region
  source 1..45: mol_type = other DNA
gcgaccccaccgtctcgatatggtggaaactactacgcagactac

SEQ ID NO: 3988 - DNA, 33 bp, synthetic construct
  misc_feature 1..33: note = Synthetic polynucleotide encoding artificial human antibody CDR-H3 region
  source 1..33: mol_type = other DNA
gcgagacaagggccgacagtagcgattgacttc

SEQ ID NO: 3989 - DNA, 27 bp, synthetic construct
  misc_feature 1..27: note = Synthetic polynucleotide encoding artificial human antibody CDR-H3 region
  source 1..27: mol_type = other DNA
gcgagacggggtagagagtttgattac

SEQ ID NO: 3990 - DNA, 51 bp, synthetic construct
  misc_feature 1..51: note = Synthetic polynucleotide encoding artificial human antibody CDR-H3 region
  source 1..51: mol_type = other DNA
gcgatccaggaaaaacgggaactgcaactacgtcgagaactagataactac

SEQ ID NO: 3991 - DNA, 30 bp, synthetic construct
  misc_feature 1..30: note = Synthetic polynucleotide encoding artificial human antibody CDR-H3 region
  source 1..30: mol_type = other DNA
gcgagagtatttcgatacggtatggacgtc

SEQ ID NO: 3992 - DNA, 30 bp, synthetic construct
  misc_feature 1..30: note = Synthetic polynucleotide encoding artificial human antibody CDR-H3 region
  source 1..30: mol_type = other DNA
gcgatcaaagaaggctacggtctttcagac

SEQ ID NO: 3993 - DNA, 36 bp, synthetic construct
  misc_feature 1..36: note = Synthetic polynucleotide encoding artificial human antibody CDR-H3 region
  source 1..36: mol_type = other DNA
gcgaaagaggatggctacactcaaaattttgactac

SEQ ID NO: 3994 - DNA, 42 bp, synthetic construct
  misc_feature 1..42: note = Synthetic polynucleotide encoding artificial human antibody CDR-H3 region
  source 1..42: mol_type = other DNA
gcgagagttctggacttttatggaagtagtgtcctagactac

SEQ ID NO: 3995 - DNA, 24 bp, synthetic construct
  misc_feature 1..24: note = Synthetic polynucleotide encoding artificial human antibody CDR-H3 region
  source 1..24: mol_type = other DNA
gcgagagatcggcccggggactac

SEQ ID NO: 3996 - DNA, 33 bp, synthetic construct
  misc_feature 1..33: note = Synthetic polynucleotide encoding artificial human antibody CDR-H3 region
  source 1..33: mol_type = other DNA
gcgagagatcttggtgtgggatctactacctac

SEQ ID NO: 3997 - DNA, 42 bp, synthetic construct
  misc_feature 1..42: note = Synthetic polynucleotide encoding artificial human antibody CDR-H3 region
  source 1..42: mol_type = other DNA
gtgaaagatttggaggtttctataggtcacaattttgacttt

SEQ ID NO: 3998 - DNA, 60 bp, synthetic construct
  misc_feature 1..60: note = Synthetic polynucleotide encoding artificial human antibody CDR-H3 region
  source 1..60: mol_type = other DNA
gcgagagataggggggtagtggtggtagctgctaccccttactactacggtatggacgtc

SEQ ID NO: 3999 - DNA, 51 bp, synthetic construct
  misc_feature 1..51: note = Synthetic polynucleotide encoding artificial human antibody CDR-H3 region
  source 1..51: mol_type = other DNA
gtacacgcacgagatgactacggtgactccgcttggtcaactgggcctgtc

SEQ ID NO: 4000 - DNA, 51 bp, synthetic construct
  misc_feature 1..51: note = Synthetic polynucleotide encoding artificial human antibody CDR-H3 region
  source 1..51: mol_type = other DNA
ggacacagacgtctgttaaggggggttactactactgtctatttcgacccc

SEQ ID NO: 4001 - DNA, 51 bp, synthetic construct
  misc_feature 1..51: note = Synthetic polynucleotide encoding artificial human antibody CDR-H3 region
  source 1..51: mol_type = other DNA
gcgagaggaggggagctgctgggcggattcggctacagtggtatggacgtc

SEQ ID NO: 4002 - DNA, 57 bp, synthetic construct
  misc_feature 1..57: note = Synthetic polynucleotide encoding artificial human antibody CDR-H3 region
  source 1..57: mol_type = other DNA
gcgcattattattatgatagtagtggttattaccaaaacgctgaatacttccagtac

SEQ ID NO: 4003 - DNA, 63 bp, synthetic construct
  misc_feature 1..63: note = Synthetic polynucleotide encoding artificial human antibody CDR-H3 region
  source 1..63: mol_type = other DNA
gcgagaacccagtgggggaccgatgtagaggcaacgaatccctactactatttcatggacgtc

SEQ ID NO: 4004 - DNA, 36 bp, synthetic construct
  misc_feature 1..36: note = Synthetic polynucleotide encoding artificial human antibody CDR-H3 region
  source 1..36: mol_type = other DNA
gcgcgagatcagagtggagctgacagatttgactcc

SEQ ID NO: 4005 - DNA, 39 bp, synthetic construct
  misc_feature 1..39: note = Synthetic polynucleotide encoding artificial human antibody CDR-H3 region
  source 1..39: mol_type = other DNA
gcgagatcttcgaagtggacggactggcattttgactac

SEQ ID NO: 4006 - DNA, 42 bp, synthetic construct
  misc_feature 1..42: note = Synthetic polynucleotide encoding artificial human antibody CDR-H3 region
  source 1..42: mol_type = other DNA
gcgagagatctcgacgaaataaatagttcttggctcgacccc

SEQ ID NO: 4007 - DNA, 51 bp, synthetic construct
  misc_feature 1..51: note = Synthetic polynucleotide encoding artificial human antibody CDR-H3 region
  source 1..51: mol_type = other DNA
gcgaaacgccccaccgctggaaacagctatggtggatactactttgaccat

SEQ ID NO: 4008 - DNA, 57 bp, synthetic construct
  misc_feature 1..57: note = Synthetic polynucleotide encoding artificial human antibody CDR-H3 region
  source 1..57: mol_type = other DNA
gcgagacggggcgaagtcgggactatggttcgggttttccgaaagccgtttgactac

SEQ ID NO: 4009 - DNA, 54 bp, synthetic construct
  misc_feature 1..54: note = Synthetic polynucleotide encoding artificial human antibody CDR-H3 region
  source 1..54: mol_type = other DNA
gcgacaacctcgactatgccaatgcctactagagggagagactggttcgacccc

SEQ ID NO: 4010 - DNA, 33 bp, synthetic construct
  misc_feature 1..33: note = Synthetic polynucleotide encoding artificial human antibody CDR-H3 region
  source 1..33: mol_type = other DNA
gcgggtgcccacggtgactacggtcttgactat

SEQ ID NO: 4011 - DNA, 45 bp, synthetic construct
  misc_feature 1..45: note = Synthetic polynucleotide encoding artificial human antibody CDR-H3 region
  source 1..45: mol_type = other DNA
gcgagacatcagcagaagtatagccccatttccccgcttgactac

SEQ ID NO: 4012 - DNA, 39 bp, synthetic construct
  misc_feature 1..39: note = Synthetic polynucleotide encoding artificial human antibody CDR-H3 region
  source 1..39: mol_type = other DNA
gcaaaagacgcacgcctggcttattatggtatggacgtc

SEQ ID NO: 4013 - DNA, 36 bp, synthetic construct
  misc_feature 1..36: note = Synthetic polynucleotide encoding artificial human antibody CDR-H3 region
  source 1..36: mol_type = other DNA
gcgagacactcgagtggttattcagaacttgcctac

SEQ ID NO: 4014 - DNA, 42 bp, synthetic construct
  misc_feature 1..42: note = Synthetic polynucleotide encoding artificial human antibody CDR-H3 region
  source 1..42: mol_type = other DNA
gcgagagtccacaattgggacttctactacggtatggacgtc

SEQ ID NO: 4015 - DNA, 45 bp, synthetic construct
  misc_feature 1..45: note = Synthetic polynucleotide encoding artificial human antibody CDR-H3 region
  source 1..45: mol_type = other DNA
actagagagaggccccctaattgtggatctagctgccccgagacc

SEQ ID NO: 4016 - DNA, 36 bp, synthetic construct
  misc_feature 1..36: note = Synthetic polynucleotide encoding artificial human antibody CDR-H3 region
  source 1..36: mol_type = other DNA
gcgagagtcgggacatctcattggtactctgattct

SEQ ID NO: 4017 - DNA, 30 bp, synthetic construct
  misc_feature 1..30: note = Synthetic polynucleotide encoding artificial human antibody CDR-H3 region
  source 1..30: mol_type = other DNA
gcgagagacgaggggcgaagagagggcgcc

SEQ ID NO: 4018 - DNA, 39 bp, synthetic construct
  misc_feature 1..39: note = Synthetic polynucleotide encoding artificial human antibody CDR-H3 region
  source 1..39: mol_type = other DNA
gcgagagatatcgcgctgggacggggcggtatggacgtc

SEQ ID NO: 4019 - DNA, 36 bp, synthetic construct
  misc_feature 1..36: note = Synthetic polynucleotide encoding artificial human antibody CDR-H3 region
  source 1..36: mol_type = other DNA
gcgagacatagaacgggccaatattactataatagt

SEQ ID NO: 4020 - DNA, 33 bp, synthetic construct
  misc_feature 1..33: note = Synthetic polynucleotide encoding artificial human antibody CDR-H3 region
  source 1..33: mol_type = other DNA
gcggcgtccggctacggtgaccacgtggcctac

SEQ ID NO: 4021 - DNA, 48 bp, synthetic construct
  misc_feature 1..48: note = Synthetic polynucleotide encoding artificial human antibody CDR-H3 region
  source 1..48: mol_type = other DNA
gcgagagggaatggacctaagagtgggaagtactcggactttgactac

SEQ ID NO: 4022 - DNA, 30 bp, synthetic construct
  misc_feature 1..30: note = Synthetic polynucleotide encoding artificial human antibody CDR-H3 region
  source 1..30: mol_type = other DNA
gcgagagataagtcctggtactttgactac

SEQ ID NO: 4023 - DNA, 45 bp, synthetic construct
  misc_feature 1..45: note = Synthetic polynucleotide encoding artificial human antibody CDR-H3 region
  source 1..45: mol_type = other DNA
gcgagatccaccgctagtagtggttattatgatgcttttgatatc

SEQ ID NO: 4024 - DNA, 66 bp, synthetic construct
  misc_feature 1..66: note = Synthetic polynucleotide encoding artificial human antibody CDR-H3 region
  source 1..66: mol_type = other DNA
gcgagagatcgtcgagagtatagcagctcgtcccggccttcatatcactactactacatggacgtc

SEQ ID NO: 4025 - DNA, 39 bp, synthetic construct
  misc_feature 1..39: note = Synthetic polynucleotide encoding artificial human antibody CDR-H3 region
  source 1..39: mol_type = other DNA
gcgtcccgatatagaagcccgtccggtgcttttgacatc

SEQ ID NO: 4026 - DNA, 24 bp, synthetic construct
  misc_feature 1..24: note = Synthetic polynucleotide encoding artificial human antibody CDR-H3 region
  source 1..24: mol_type = other DNA
accagaggagcagtggccgactac

SEQ ID NO: 4027 - DNA, 42 bp, synthetic construct
  misc_feature 1..42: note = Synthetic polynucleotide encoding artificial human antibody CDR-H3 region
  source 1..42: mol_type = other DNA
gcgacctcccacggaggactagtgcctggcggcgaaaactac

SEQ ID NO: 4028 - DNA, 48 bp, synthetic construct
  misc_feature 1..48: note = Synthetic polynucleotide encoding artificial human antibody CDR-H3 region
  source 1..48: mol_type = other DNA
gtgagagaggagtttggagtggttcgtggacctaatccctttgatgtc

SEQ ID NO: 4029 - DNA, 57 bp, synthetic construct
  misc_feature 1..57: note = Synthetic polynucleotide encoding artificial human antibody CDR-H3 region
  source 1..57: mol_type = other DNA
gcgaaaacccgttcttatagttccgctgacactactcgtcccaatgccccgggctac

SEQ ID NO: 4030 - DNA, 45 bp, synthetic construct
  misc_feature 1..45: note = Synthetic polynucleotide encoding artificial human antibody CDR-H3 region
  source 1..45: mol_type = other DNA
gcgaaagatggccaaactggaactacaaccccatactttgactac

SEQ ID NO: 4031 - DNA, 30 bp, synthetic construct
  misc_feature 1..30: note = Synthetic polynucleotide encoding artificial human antibody CDR-H3 region
  source 1..30: mol_type = other DNA
gcgagagccggggctgagggcgttgactat

SEQ ID NO: 4032 - DNA, 42 bp, synthetic construct
  misc_feature 1..42: note = Synthetic polynucleotide encoding artificial human antibody CDR-H3 region
  source 1..42: mol_type = other DNA
gcgagacgatccgataaagcagtgcctgggacctttgaccag

SEQ ID NO: 4033 - DNA, 45 bp, synthetic construct
  misc_feature 1..45: note = Synthetic polynucleotide encoding artificial human antibody CDR-H3 region
  source 1..45: mol_type = other DNA
gcacacagggggggaaagaaccctcgttattggtacttcgatctc

SEQ ID NO: 4034 - DNA, 39 bp, synthetic construct
  misc_feature 1..39: note = Synthetic polynucleotide encoding artificial human antibody CDR-H3 region
  source 1..39: mol_type = other DNA
gcgagaggggaggggggggaattatgggcctttgactac

SEQ ID NO: 4035 - DNA, 42 bp, synthetic construct
  misc_feature 1..42: note = Synthetic polynucleotide encoding artificial human antibody CDR-H3 region
  source 1..42: mol_type = other DNA
gcgagagaggggcttcgtctggcacgtggctggtttcacccc

SEQ ID NO: 4036 - DNA, 36 bp, synthetic construct
  misc_feature 1..36: note = Synthetic polynucleotide encoding artificial human antibody CDR-H3 region
  source 1..36: mol_type = other DNA
gcgagagattttgatgatggctacgacatccgttac

SEQ ID NO: 4037 - DNA, 39 bp, synthetic construct
  misc_feature 1..39: note = Synthetic polynucleotide encoding artificial human antibody CDR-H3 region
  source 1..39: mol_type = other DNA
gtgaaatcaccagtggccgcaaatgatgcttttgatatc

SEQ ID NO: 4038 - DNA, 39 bp, synthetic construct
  misc_feature 1..39: note = Synthetic polynucleotide encoding artificial human antibody CDR-H3 region
  source 1..39: mol_type = other DNA
gcgagagtgtctgtggccgccccaacgtgcttggactac

SEQ ID NO: 4039 - DNA, 45 bp, synthetic construct
  misc_feature 1..45: note = Synthetic polynucleotide encoding artificial human antibody CDR-H3 region
  source 1..45: mol_type = other DNA
gcgagacattcagggcacgatcagttgccgctagactttgacaac

SEQ ID NO: 4040 - DNA, 27 bp, synthetic construct
  misc_feature 1..27: note = Synthetic polynucleotide encoding artificial human antibody CDR-H3 region
  source 1..27: mol_type = other DNA
gcaggaggaggaagtcaagtggacttc

SEQ ID NO: 4041 - DNA, 51 bp, synthetic construct
  misc_feature 1..51: note = Synthetic polynucleotide encoding artificial human antibody CDR-H3 region
  source 1..51: mol_type = other DNA
gcacacagattcgggagaggggtgtcctactactactacggtatggacgtc

SEQ ID NO: 4042 - DNA, 36 bp, synthetic construct
  misc_feature 1..36: note = Synthetic polynucleotide encoding artificial human antibody CDR-H3 region
  source 1..36: mol_type = other DNA
gcgaaagatagtgggagcaacgacgacatggacgtc

SEQ ID NO: 4043 - DNA, 39 bp, synthetic construct
  misc_feature 1..39: note = Synthetic polynucleotide encoding artificial human antibody CDR-H3 region
  source 1..39: mol_type = other DNA
gcgagaagaggtttttactactactacggtatggacgtc

SEQ ID NO: 4044 - DNA, 30 bp, synthetic construct
  misc_feature 1..30: note = Synthetic polynucleotide encoding artificial human antibody CDR-H3 region
  source 1..30: mol_type = other DNA
gcgagtctcctcgggggcgatcctgactac

SEQ ID NO: 4045 - DNA, 60 bp, synthetic construct
  misc_feature 1..60: note = Synthetic polynucleotide encoding artificial human antibody CDR-H3 region
  source 1..60: mol_type = other DNA
gcacggatgcaaatagtggctacgacacagacctactactactactacggtatggacgtc

SEQ ID NO: 4046 - DNA, 39 bp, synthetic construct
  misc_feature 1..39: note = Synthetic polynucleotide encoding artificial human antibody CDR-H3 region
  source 1..39: mol_type = other DNA
gcgagagcgggctacgatcttttcggctggttcgacccc

SEQ ID NO: 4047 - DNA, 57 bp, synthetic construct
  misc_feature 1..57: note = Synthetic polynucleotide encoding artificial human antibody CDR-H3 region
  source 1..57: mol_type = other DNA
gcgaaacccaactcccctttcactggcagtggaagtttccacaactactttgactac

SEQ ID NO: 4048 - DNA, 18 bp, synthetic construct
  misc_feature 1..18: note = Synthetic polynucleotide encoding artificial human antibody CDR-H3 region
  source 1..18: mol_type = other DNA
gcgagtcccgttcgaccc

SEQ ID NO: 4049 - DNA, 63 bp, synthetic construct
  misc_feature 1..63: note = Synthetic polynucleotide encoding artificial human antibody CDR-H3 region
  source 1..63: mol_type = other DNA
gcgagaggattttgtgatcttcccgcctgttatcccgtacctcaatacaactggttcgacccc

SEQ ID NO: 4050 - DNA, 39 bp, synthetic construct
  misc_feature 1..39: note = Synthetic polynucleotide encoding artificial human antibody CDR-H3 region
  source 1..39: mol_type = other DNA
gcgcgatatagtgggagctaccctttgggctttgactac

SEQ ID NO: 4051 - DNA, 27 bp, synthetic construct
  misc_feature 1..27: note = Synthetic polynucleotide encoding artificial human antibody CDR-H3 region
  source 1..27: mol_type = other DNA
gcgagacatgaaggtgcttttgatatc

SEQ ID NO: 4052 - DNA, 36 bp, synthetic construct
  misc_feature 1..36: note = Synthetic polynucleotide encoding artificial human antibody CDR-H3 region
  source 1..36: mol_type = other DNA
accacagatcttgcggtgactacgcgatttgactac

SEQ ID NO: 4053 - DNA, 33 bp, synthetic construct
  misc_feature 1..33: note = Synthetic polynucleotide encoding artificial human antibody CDR-H3 region
  source 1..33: mol_type = other DNA
gcgagaagcacacgtacagacgctttggacgtc

SEQ ID NO: 4054 - DNA, 39 bp, synthetic construct
  misc_feature 1..39: note = Synthetic polynucleotide encoding artificial human antibody CDR-H3 region
  source 1..39: mol_type = other DNA
gctaaaaatgacgagatggactttaagggctatgactac

SEQ ID NO: 4055 - DNA, 27 bp, synthetic construct
  misc_feature 1..27: note = Synthetic polynucleotide encoding artificial human antibody CDR-H3 region
  source 1..27: mol_type = other DNA
gcgagaggggagttattattcgaccac

SEQ ID NO: 4056 - DNA, 30 bp, synthetic construct
  misc_feature 1..30: note = Synthetic polynucleotide encoding artificial human antibody CDR-H3 region
  source 1..30: mol_type = other DNA
gctagagaatctacggtggttcttgacttc

SEQ ID NO: 4057 - DNA, 36 bp, synthetic construct
  misc_feature 1..36: note = Synthetic polynucleotide encoding artificial human antibody CDR-H3 region
  source 1..36: mol_type = other DNA
gcgaaaaggtcaacagcagtgggggacttcgacccc

SEQ ID NO: 4058 - DNA, 48 bp, synthetic construct
  misc_feature 1..48: note = Synthetic polynucleotide encoding artificial human antibody CDR-H3 region
  source 1..48: mol_type = other DNA
gcgcgggggccgtccaactggaacgggggtccggagcacatggacgtc

SEQ ID NO: 4059 - DNA, 18 bp, synthetic construct
  misc_feature 1..18: note = Synthetic polynucleotide encoding artificial human antibody CDR-H3 region
  source 1..18: mol_type = other DNA
gcgagagattttgactac

SEQ ID NO: 4060 - DNA, 42 bp, synthetic construct
  misc_feature 1..42: note = Synthetic polynucleotide encoding artificial human antibody CDR-H3 region
  source 1..42: mol_type = other DNA
gcgagagatccctatggttcggggacggtctggttcgacccc

SEQ ID NO: 4061 - DNA, 60 bp, synthetic construct
  misc_feature 1..60: note = Synthetic polynucleotide encoding artificial human antibody CDR-H3 region
  source 1..60: mol_type = other DNA
gcgaaaactgagtacacttttttgagtggctccgactactaccagtacggtatggacgtc

SEQ ID NO: 4062 - DNA, 48 bp, synthetic construct
  misc_feature 1..48: note = Synthetic polynucleotide encoding artificial human antibody CDR-H3 region
  source 1..48: mol_type = other DNA
gcgagacgggggttattgcgtgggagcaacgagggaaggtttgactac

SEQ ID NO: 4063 - DNA, 45 bp, synthetic construct
  misc_feature 1..45: note = Synthetic polynucleotide encoding artificial human antibody CDR-H3 region
  source 1..45: mol_type = other DNA
actagacgcggcagtgcctggacggacccctactacacggacgtc

SEQ ID NO: 4064 - DNA, 33 bp, synthetic construct
  misc_feature 1..33: note = Synthetic polynucleotide encoding artificial human antibody CDR-H3 region
  source 1..33: mol_type = other DNA
gcgagagatgatgtccctaggggttatgactac

SEQ ID NO: 4065 - DNA, 39 bp, synthetic construct
  misc_feature 1..39: note = Synthetic polynucleotide encoding artificial human antibody CDR-H3 region
  source 1..39: mol_type = other DNA
gcgagagagtacattgtacccttctacggtatggacgtc

SEQ ID NO: 4066 - DNA, 27 bp, synthetic construct
  misc_feature 1..27: note = Synthetic polynucleotide encoding artificial human antibody CDR-L3 region
  source 1..27: mol_type = other DNA
caacagactaacactttccccctcact

SEQ ID NO: 4067 - DNA, 27 bp, synthetic construct
  misc_feature 1..27: note = Synthetic polynucleotide encoding artificial human antibody CDR-L3 region
  source 1..27: mol_type = other DNA
caacagagttacagtacccctccgcgt

SEQ ID NO: 4068 - DNA, 27 bp, synthetic construct
  misc_feature 1..27: note = Synthetic polynucleotide encoding artificial human antibody CDR-L3 region
  source 1..27: mol_type = other DNA
caacagtctaacagtttccccgggact

SEQ ID NO: 4069 - DNA, 33 bp, synthetic construct
  misc_feature 1..33: note = Synthetic polynucleotide encoding artificial human antibody CDR-L3 region
  source 1..33: mol_type = other DNA
gcagcatgggaggacagcctgagtggtccggtg

SEQ ID NO: 4070 - DNA, 27 bp, synthetic construct
  misc_feature 1..27: note = Synthetic polynucleotide encoding artificial human antibody CDR-L3 region
  source 1..27: mol_type = other DNA
aactcccgggacaggagtggttatgtc

SEQ ID NO: 4071 - DNA, 33 bp, synthetic construct
  misc_feature 1..33: note = Synthetic polynucleotide encoding artificial human antibody CDR-L3 region
  source 1..33: mol_type = other DNA
caggtgtgggataatggtcattctcattgggtg

SEQ ID NO: 4072 - DNA, 27 bp, synthetic construct
  misc_feature 1..27: note = Synthetic polynucleotide encoding artificial human antibody CDR-L3 region
  source 1..27: mol_type = other DNA
caacagagttacagaatgccttgcagt

SEQ ID NO: 4073 - DNA, 30 bp, synthetic construct
  misc_feature 1..30: note = Synthetic polynucleotide encoding artificial human antibody CDR-L3 region
  source 1..30: mol_type = other DNA
cagcagtatggtagctcacctcccatcacc

SEQ ID NO: 4074 - DNA, 27 bp, synthetic construct
  misc_feature 1..27: note = Synthetic polynucleotide encoding artificial human antibody CDR-L3 region
  source 1..27: mol_type = other DNA
cagtcttatgatacaaccaatgtgata

SEQ ID NO: 4075 - DNA, 27 bp, synthetic construct
  misc_feature 1..27: note = Synthetic polynucleotide encoding artificial human antibody CDR-L3 region
  source 1..27: mol_type = other DNA
caacagtatgatagttcacccttcact

SEQ ID NO: 4076 - DNA, 30 bp, synthetic construct
  misc_feature 1..30: note = Synthetic polynucleotide encoding artificial human antibody CDR-L3 region
  source 1..30: mol_type = other DNA
ggaacatgggatgacaacctgagtgctgta

SEQ ID NO: 4077 - DNA, 27 bp, synthetic construct
  misc_feature 1..27: note = Synthetic polynucleotide encoding artificial human antibody CDR-L3 region
  source 1..27: mol_type = other DNA
ctgcaaggtacacactggcctccgacg

SEQ ID NO: 4078 - DNA, 33 bp, synthetic construct
  misc_feature 1..33: note = Synthetic polynucleotide encoding artificial human antibody CDR-L3 region
  source 1..33: mol_type = other DNA
gcagcatgggatgacaatgtgagtggtcctggc

SEQ ID NO: 4079 - DNA, 33 bp, synthetic construct
  misc_feature 1..33: note = Synthetic polynucleotide encoding artificial human antibody CDR-L3 region
  source 1..33: mol_type = other DNA
gcaacatgggatgacagcctgaatggtccggtg

SEQ ID NO: 4080 - DNA, 24 bp, synthetic construct
  misc_feature 1..24: note = Synthetic polynucleotide encoding artificial human antibody CDR-L3 region
  source 1..24: mol_type = other DNA
cagcagtataataactggtggacg

SEQ ID NO: 4081 - DNA, 27 bp, synthetic construct
  misc_feature 1..27: note = Synthetic polynucleotide encoding artificial human antibody CDR-L3 region
  source 1..27: mol_type = other DNA
cagcaatatggtagttttcggtacact

SEQ ID NO: 4082 - DNA, 30 bp, synthetic construct
  misc_feature 1..30: note = Synthetic polynucleotide encoding artificial human antibody CDR-L3 region
  source 1..30: mol_type = other DNA
caatcagcagacagcagtgatacttatgtg

SEQ ID NO: 4083 - DNA, 27 bp, synthetic construct
  misc_feature 1..27: note = Synthetic polynucleotide encoding artificial human antibody CDR-L3 region
  source 1..27: mol_type = other DNA
cagcagcgtagcaactggcctctcact

SEQ ID NO: 4084 - DNA, 30 bp, synthetic construct
  misc_feature 1..30: note = Synthetic polynucleotide encoding artificial human antibody CDR-L3 region
  source 1..30: mol_type = other DNA
cagcagggtagcaactggttggcgctcact

SEQ ID NO: 4085 - DNA, 27 bp, synthetic construct
  misc_feature 1..27: note = Synthetic polynucleotide encoding artificial human antibody CDR-L3 region
  source 1..27: mol_type = other DNA
caacagtattatattaaccctcggacg

SEQ ID NO: 4086 - DNA, 27 bp, synthetic construct
  misc_feature 1..27: note = Synthetic polynucleotide encoding artificial human antibody CDR-L3 region
  source 1..27: mol_type = other DNA
cagcaatattatagtactccgtacact

SEQ ID NO: 4087 - DNA, 27 bp, synthetic construct
  misc_feature 1..27: note = Synthetic polynucleotide encoding artificial human antibody CDR-L3 region
  source 1..27: mol_type = other DNA
caacagagtttcaacaccgtgctcact

SEQ ID NO: 4088 - DNA, 33 bp, synthetic construct
  misc_feature 1..33: note = Synthetic polynucleotide encoding artificial human antibody CDR-L3 region
  source 1..33: mol_type = other DNA
agctcatatacaatcaccagcacgctttgggtg

SEQ ID NO: 4089 - DNA, 33 bp, synthetic construct
  misc_feature 1..33: note = Synthetic polynucleotide encoding artificial human antibody CDR-L3 region
  source 1..33: mol_type = other DNA
gcagcatgggatgacagcctgagtggtccggta

SEQ ID NO: 4090 - DNA, 27 bp, synthetic construct
  misc_feature 1..27: note = Synthetic polynucleotide encoding artificial human antibody CDR-L3 region
  source 1..27: mol_type = other DNA
cagcagacttacagtaatccttggacg

SEQ ID NO: 4091 - DNA, 27 bp, synthetic construct
  misc_feature 1..27: note = Synthetic polynucleotide encoding artificial human antibody CDR-L3 region
  source 1..27: mol_type = other DNA
caacagacttacagtcaccctcgcacg

SEQ ID NO: 4092 - DNA, 33 bp, synthetic construct
  misc_feature 1..33: note = Synthetic polynucleotide encoding artificial human antibody CDR-L3 region
  source 1..33: mol_type = other DNA
cagtcctatgacagcagcctgagtggttatgtc

SEQ ID NO: 4093 - DNA, 33 bp, synthetic construct
  misc_feature 1..33: note = Synthetic polynucleotide encoding artificial human antibody CDR-L3 region
  source 1..33: mol_type = other DNA
caggtgtgggatagtagtagtgatcattatgtc

SEQ ID NO: 4094 - DNA, 27 bp, synthetic construct
  misc_feature 1..27: note = Synthetic polynucleotide encoding artificial human antibody CDR-L3 region
  source 1..27: mol_type = other DNA
caacagactagcagtttccctcgaact

SEQ ID NO: 4095 - DNA, 30 bp, synthetic construct
  misc_feature 1..30: note = Synthetic polynucleotide encoding artificial human antibody CDR-L3 region
  source 1..30: mol_type = other DNA
caatcagtagacattacttctacttgggtg

SEQ ID NO: 4096 - DNA, 33 bp, synthetic construct
  misc_feature 1..33: note = Synthetic polynucleotide encoding artificial human antibody CDR-L3 region
  source 1..33: mol_type = other DNA
agctcatatataagtagcctcacttatgtgctg

SEQ ID NO: 4097 - DNA, 33 bp, synthetic construct
  misc_feature 1..33: note = Synthetic polynucleotide encoding artificial human antibody CDR-L3 region
  source 1..33: mol_type = other DNA
ggaacatgggatagtagcctgagtgttggggtg

SEQ ID NO: 4098 - DNA, 27 bp, synthetic construct
  misc_feature 1..27: note = Synthetic polynucleotide encoding artificial human antibody CDR-L3 region
  source 1..27: mol_type = other DNA
atgcaaggtacacactggccgatcacc

SEQ ID NO: 4099 - DNA, 27 bp, synthetic construct
  misc_feature 1..27: note = Synthetic polynucleotide encoding artificial human antibody CDR-L3 region
  source 1..27: mol_type = other DNA
cagcagtatgatagctcatcgtggacg

SEQ ID NO: 4100 - DNA, 33 bp, synthetic construct
  misc_feature 1..33: note = Synthetic polynucleotide encoding artificial human antibody CDR-L3 region
  source 1..33: mol_type = other DNA
cagtcgtatgacagcagcctgagaggtgtggtg

SEQ ID NO: 4101 - DNA, 27 bp, synthetic construct
  misc_feature 1..27: note = Synthetic polynucleotide encoding artificial human antibody CDR-L3 region
  source 1..27: mol_type = other DNA
caacagagttacagtacccctcggacg

SEQ ID NO: 4102 - DNA, 27 bp, synthetic construct
  misc_feature 1..27: note = Synthetic polynucleotide encoding artificial human antibody CDR-L3 region
  source 1..27: mol_type = other DNA
cagcaatattatagcactccgtggacg

SEQ ID NO: 4103 - DNA, 39 bp, synthetic construct
  misc_feature 1..39: note = Synthetic polynucleotide encoding artificial human antibody CDR-L3 region
  source 1..39: mol_type = other DNA
cagtcctatgacagcggcctgagtggttcgaaggtggtc

SEQ ID NO: 4104 - DNA, 27 bp, synthetic construct
  misc_feature 1..27: note = Synthetic polynucleotide encoding artificial human antibody CDR-L3 region
  source 1..27: mol_type = other DNA
cagtcttatgatctcagcacttgggtg

SEQ ID NO: 4105 - DNA, 27 bp, synthetic construct
  misc_feature 1..27: note = Synthetic polynucleotide encoding artificial human antibody CDR-L3 region
  source 1..27: mol_type = other DNA
caccagagttacagtacctctctcact

SEQ ID NO: 4106 - DNA, 33 bp, synthetic construct
  misc_feature 1..33: note = Synthetic polynucleotide encoding artificial human antibody CDR-L3 region
  source 1..33: mol_type = other DNA
caggtgtgggatagtagtagtgatcattgggtg

SEQ ID NO: 4107 - DNA, 30 bp, synthetic construct
  misc_feature 1..30: note = Synthetic polynucleotide encoding artificial human antibody CDR-L3 region
  source 1..30: mol_type = other DNA
agctcatatacaagcagcagcactcaggta

SEQ ID NO: 4108 - DNA, 27 bp, synthetic construct
  misc_feature 1..27: note = Synthetic polynucleotide encoding artificial human antibody CDR-L3 region
  source 1..27: mol_type = other DNA
caacagagttacagtacccctaagacg

SEQ ID NO: 4109 - DNA, 30 bp, synthetic construct
  misc_feature 1..30: note = Synthetic polynucleotide encoding artificial human antibody CDR-L3 region
  source 1..30: mol_type = other DNA
caacagtttaatacttaccctctgtacacc

SEQ ID NO: 4110 - DNA, 33 bp, synthetic construct
  misc_feature 1..33: note = Synthetic polynucleotide encoding artificial human antibody CDR-L3 region
  source 1..33: mol_type = other DNA
gactcccgggacagcagtggtaacctcgtggta

SEQ ID NO: 4111 - DNA, 27 bp, synthetic construct
  misc_feature 1..27: note = Synthetic polynucleotide encoding artificial human antibody CDR-L3 region
  source 1..27: mol_type = other DNA
caacagactaacagtttcccccggact

SEQ ID NO: 4112 - DNA, 30 bp, synthetic construct
  misc_feature 1..30: note = Synthetic polynucleotide encoding artificial human antibody CDR-L3 region
  source 1..30: mol_type = other DNA
caacagagttacagtgtccctccgtggacg

SEQ ID NO: 4113 - DNA, 30 bp, synthetic construct
  misc_feature 1..30: note = Synthetic polynucleotide encoding artificial human antibody CDR-L3 region
  source 1..30: mol_type = other DNA
cagcaatatggtagctcacctcggtacact

SEQ ID NO: 4114 - DNA, 24 bp, synthetic construct
  misc_feature 1..24: note = Synthetic polynucleotide encoding artificial human antibody CDR-L3 region
  source 1..24: mol_type = other DNA
cagcagtatggtagcgcgtggacg

SEQ ID NO: 4115 - DNA, 30 bp, synthetic construct
  misc_feature 1..30: note = Synthetic polynucleotide encoding artificial human antibody CDR-L3 region
  source 1..30: mol_type = other DNA
cagcagcgtgccaactggcctcctatcacc

SEQ ID NO: 4116 - DNA, 27 bp, synthetic construct
  misc_feature 1..27: note = Synthetic polynucleotide encoding artificial human antibody CDR-L3 region
  source 1..27: mol_type = other DNA
caacagtataatagttacccgtggacg

SEQ ID NO: 4117 - DNA, 36 bp, synthetic construct
  misc_feature 1..36: note = Synthetic polynucleotide encoding artificial human antibody CDR-L3 region
  source 1..36: mol_type = other DNA
caggtgtgggatagtagtagtgatcattatgtggta

SEQ ID NO: 4118 - DNA, 30 bp, synthetic construct
  misc_feature 1..30: note = Synthetic polynucleotide encoding artificial human antibody CDR-L3 region
  source 1..30: mol_type = other DNA
cagcagcgtagcaactggcctccgctcact

SEQ ID NO: 4119 - DNA, 27 bp, synthetic construct
  misc_feature 1..27: note = Synthetic polynucleotide encoding artificial human antibody CDR-L3 region
  source 1..27: mol_type = other DNA
atgcaagctctacaaactccctacact

SEQ ID NO: 4120 - DNA, 24 bp, synthetic construct
  misc_feature 1..24: note = Synthetic polynucleotide encoding artificial human antibody CDR-L3 region
  source 1..24: mol_type = other DNA
caacagtataatagttattcgacg

SEQ ID NO: 4121 - DNA, 30 bp, synthetic construct
  misc_feature 1..30: note = Synthetic polynucleotide encoding artificial human antibody CDR-L3 region
  source 1..30: mol_type = other DNA
ttgctatatatgggcagtggcatttcggtt

SEQ ID NO: 4122 - DNA, 30 bp, synthetic construct
  misc_feature 1..30: note = Synthetic polynucleotide encoding artificial human antibody CDR-L3 region
  source 1..30: mol_type = other DNA
cagcactatggtgcctcaccgccgtggacg

SEQ ID NO: 4123 - DNA, 36 bp, synthetic construct
  misc_feature 1..36: note = Synthetic polynucleotide encoding artificial human antibody CDR-L3 region
  source 1..36: mol_type = other DNA
caggtgtgggatagtaataatgatcaccgggaggtg

SEQ ID NO: 4124 - DNA, 27 bp, synthetic construct
  misc_feature 1..27: note = Synthetic polynucleotide encoding artificial human antibody CDR-L3 region
  source 1..27: mol_type = other DNA
caacagtatgatagttatcctctctct

SEQ ID NO: 4125 - DNA, 27 bp, synthetic construct
  misc_feature 1..27: note = Synthetic polynucleotide encoding artificial human antibody CDR-L3 region
  source 1..27: mol_type = other DNA
ctacaacatgataatttcccgtacact

SEQ ID NO: 4126 - DNA, 27 bp, synthetic construct
  misc_feature 1..27: note = Synthetic polynucleotide encoding artificial human antibody CDR-L3 region
  source 1..27: mol_type = other DNA
cagcaatacggcagttcaccgctcacc

SEQ ID NO: 4127 - DNA, 33 bp, synthetic construct
  misc_feature 1..33: note = Synthetic polynucleotide encoding artificial human antibody CDR-L3 region
  source 1..33: mol_type = other DNA
tactcaacagacagcagtggtaatcatggggtg

SEQ ID NO: 4128 - DNA, 27 bp, synthetic construct
  misc_feature 1..27: note = Synthetic polynucleotide encoding artificial human antibody CDR-L3 region
  source 1..27: mol_type = other DNA
atgcaagctctacaaactcctaacact

SEQ ID NO: 4129 - DNA, 33 bp, synthetic construct
  misc_feature 1..33: note = Synthetic polynucleotide encoding artificial human antibody CDR-L3 region
  source 1..33: mol_type = other DNA
aactcatattcaagcagcagcactctttatgtc

SEQ ID NO: 4130 - DNA, 30 bp, synthetic construct
  misc_feature 1..30: note = Synthetic polynucleotide encoding artificial human antibody CDR-L3 region
  source 1..30: mol_type = other DNA
caacaacatagcaactggcctgagctcact

SEQ ID NO: 4131 - DNA, 30 bp, synthetic construct
  misc_feature 1..30: note = Synthetic polynucleotide encoding artificial human antibody CDR-L3 region
  source 1..30: mol_type = other DNA
agctcgtatagaagcagcggcgtttatgtc

SEQ ID NO: 4132 - DNA, 27 bp, synthetic construct
  misc_feature 1..27: note = Synthetic polynucleotide encoding artificial human antibody CDR-L3 region
  source 1..27: mol_type = other DNA
atgcaaagtatacaccttccgtacact

SEQ ID NO: 4133 - DNA, 30 bp, synthetic construct
  misc_feature 1..30: note = Synthetic polynucleotide encoding artificial human antibody CDR-L3 region
  source 1..30: mol_type = other DNA
caccagtatggtggctcacctccaaacact

SEQ ID NO: 4134 - DNA, 30 bp, synthetic construct
  misc_feature 1..30: note = Synthetic polynucleotide encoding artificial human antibody CDR-L3 region
  source 1..30: mol_type = other DNA
caacaacttaatagttaccctccactcact

SEQ ID NO: 4135 - DNA, 33 bp, synthetic construct
  misc_feature 1..33: note = Synthetic polynucleotide encoding artificial human antibody CDR-L3 region
  source 1..33: mol_type = other DNA
gcaacatgggatagcagcctgactgctggggtg

SEQ ID NO: 4136 - DNA, 27 bp, synthetic construct
  misc_feature 1..27: note = Synthetic polynucleotide encoding artificial human antibody CDR-L3 region
  source 1..27: mol_type = other DNA
cagcagcgtagcgcctggcctatcact

SEQ ID NO: 4137 - DNA, 30 bp, synthetic construct
  misc_feature 1..30: note = Synthetic polynucleotide encoding artificial human antibody CDR-L3 region
  source 1..30: mol_type = other DNA
cagcagtatggtagctcacggaagctcact

SEQ ID NO: 4138 - DNA, 27 bp, synthetic construct
  misc_feature 1..27: note = Synthetic polynucleotide encoding artificial human antibody CDR-L3 region
  source 1..27: mol_type = other DNA
caacactatgacagttatccgtggacg

SEQ ID NO: 4139 - DNA, 33 bp, synthetic construct
  misc_feature 1..33: note = Synthetic polynucleotide encoding artificial human antibody CDR-L3 region
  source 1..33: mol_type = other DNA
tgttcccgggacagcagtggtaacccttgggta

SEQ ID NO: 4140 - DNA, 27 bp, synthetic construct
  misc_feature 1..27: note = Synthetic polynucleotide encoding artificial human antibody CDR-L3 region
  source 1..27: mol_type = other DNA
caacagagttacagcacgtcgctcact

SEQ ID NO: 4141 - DNA, 33 bp, synthetic construct
  misc_feature 1..33: note = Synthetic polynucleotide encoding artificial human antibody CDR-L3 region
  source 1..33: mol_type = other DNA
cagcagtatgatagctcacctcccatgtacact

SEQ ID NO: 4142 - DNA, 36 bp, synthetic construct
  misc_feature 1..36: note = Synthetic polynucleotide encoding artificial human antibody CDR-L3 region
  source 1..36: mol_type = other DNA
ggaacatgggatagcagcctgagtcctgggggggta

SEQ ID NO: 4143 - DNA, 24 bp, synthetic construct
  misc_feature 1..24: note = Synthetic polynucleotide encoding artificial human antibody CDR-L3 region
  source 1..24: mol_type = other DNA
caacagagttacaatgcccggacg

SEQ ID NO: 4144 - DNA, 30 bp, synthetic construct
  misc_feature 1..30: note = Synthetic polynucleotide encoding artificial human antibody CDR-L3 region
  source 1..30: mol_type = other DNA
cagcaatattatgatactgctccgctcact

SEQ ID NO: 4145 - DNA, 27 bp, synthetic construct
  misc_feature 1..27: note = Synthetic polynucleotide encoding artificial human antibody CDR-L3 region
  source 1..27: mol_type = other DNA
cagcagtatagtaaatggcccatcacc

SEQ ID NO: 4146 - DNA, 27 bp, synthetic construct
  misc_feature 1..27: note = Synthetic polynucleotide encoding artificial human antibody CDR-L3 region
  source 1..27: mol_type = other DNA
caacagacttacactacccctaggacg

SEQ ID NO: 4147 - DNA, 33 bp, synthetic construct
  misc_feature 1..33: note = Synthetic polynucleotide encoding artificial human antibody CDR-L3 region
  source 1..33: mol_type = other DNA
cagtcctatgacagccgcctgagtggtgtggta

SEQ ID NO: 4148 - DNA, 27 bp, synthetic construct
  misc_feature 1..27: note = Synthetic polynucleotide encoding artificial human antibody CDR-L3 region
  source 1..27: mol_type = other DNA
cagcagtatactaccaggcctctcact

SEQ ID NO: 4149 - DNA, 27 bp, synthetic construct
  misc_feature 1..27: note = Synthetic polynucleotide encoding artificial human antibody CDR-L3 region
  source 1..27: mol_type = other DNA
caacagcggagcaagtggcctctcact

SEQ ID NO: 4150 - DNA, 36 bp, synthetic construct
  misc_feature 1..36: note = Synthetic polynucleotide encoding artificial human antibody CDR-L3 region
  source 1..36: mol_type = other DNA
gcaacatgggatgacagcctgggtggccgtgtggtt

SEQ ID NO: 4151 - DNA, 27 bp, synthetic construct
  misc_feature 1..27: note = Synthetic polynucleotide encoding artificial human antibody CDR-L3 region
  source 1..27: mol_type = other DNA
atgcaacgtatagagtttcctttcact

SEQ ID NO: 4152 - DNA, 27 bp, synthetic construct
  misc_feature 1..27: note = Synthetic polynucleotide encoding artificial human antibody CDR-L3 region
  source 1..27: mol_type = other DNA
caggcgtgggacagcagcactgcggta

SEQ ID NO: 4153 - DNA, 27 bp, synthetic construct
  misc_feature 1..27: note = Synthetic polynucleotide encoding artificial human antibody CDR-L3 region
  source 1..27: mol_type = other DNA
cagtcgtgggacagtagttctgtgcta

SEQ ID NO: 4154 - DNA, 27 bp, synthetic construct
  misc_feature 1..27: note = Synthetic polynucleotide encoding artificial human antibody CDR-L3 region
  source 1..27: mol_type = other DNA
cagcaatattatggtcgtctattcact

SEQ ID NO: 4155 - DNA, 33 bp, synthetic construct
  misc_feature 1..33: note = Synthetic polynucleotide encoding artificial human antibody CDR-L3 region
  source 1..33: mol_type = other DNA
cagcagcgtagcaactggcctccgaggctccct

SEQ ID NO: 4156 - DNA, 30 bp, synthetic construct
  misc_feature 1..30: note = Synthetic polynucleotide encoding artificial human antibody CDR-L3 region
  source 1..30: mol_type = other DNA
cagcagcgtagcaactggcctccgtacact

SEQ ID NO: 4157 - DNA, 27 bp, synthetic construct
  misc_feature 1..27: note = Synthetic polynucleotide encoding artificial human antibody CDR-L3 region
  source 1..27: mol_type = other DNA
atgcaagctctacaaactccgtacact

SEQ ID NO: 4158 - DNA, 27 bp, synthetic construct
  misc_feature 1..27: note = Synthetic polynucleotide encoding artificial human antibody CDR-L3 region
  source 1..27: mol_type = other DNA
caacactatgatagttatattggaacg

SEQ ID NO: 4159 - DNA, 33 bp, synthetic construct
  misc_feature 1..33: note = Synthetic polynucleotide encoding artificial human antibody CDR-L3 region
  source 1..33: mol_type = other DNA
ggaacatgggatagcagtttgggtggcggagtg

SEQ ID NO: 4160 - DNA, 30 bp, synthetic construct; identical to SEQ ID NO: 4156
  misc_feature 1..30: note = Synthetic polynucleotide encoding artificial human antibody CDR-L3 region
  source 1..30: mol_type = other DNA

SEQ ID NO: 4161 - DNA, 27 bp, synthetic construct
  misc_feature 1..27: note = Synthetic polynucleotide encoding artificial human antibody CDR-L3 region
  source 1..27: mol_type = other DNA
atggaagctgaacaaactccggggact

SEQ ID NO: 4162 - DNA, 30 bp, synthetic construct
  misc_feature 1..30: note = Synthetic polynucleotide encoding artificial human antibody CDR-L3 region
  source 1..30: mol_type = other DNA
agctcatatacaagcagcaccactgtgctt

SEQ ID NO: 4163 - DNA, 30 bp, synthetic construct
  misc_feature 1..30: note = Synthetic polynucleotide encoding artificial human antibody CDR-L3 region
  source 1..30: mol_type = other DNA
atgcaaggtacacactggcctccgatcacc

SEQ ID NO: 4164 - DNA, 27 bp, synthetic construct
  misc_feature 1..27: note = Synthetic polynucleotide encoding artificial human antibody CDR-L3 region
  source 1..27: mol_type = other DNA
caccagacttacagtacccggctcact

SEQ ID NO: 4165 - DNA, 27 bp, synthetic construct
  misc_feature 1..27: note = Synthetic polynucleotide encoding artificial human antibody CDR-L3 region
  source 1..27: mol_type = other DNA
caacagtatgataatctcccgctcact

SEQ ID NO: 4166 - DNA, 33 bp, synthetic construct
  misc_feature 1..33: note = Synthetic polynucleotide encoding artificial human antibody CDR-L3 region
  source 1..33: mol_type = other DNA
caggtgtgggatagcagtagtgatccttgggtg

SEQ ID NO: 4167 - DNA, 30 bp, synthetic construct
  misc_feature 1..30: note = Synthetic polynucleotide encoding artificial human antibody CDR-L3 region
  source 1..30: mol_type = other DNA
caacaactgaatagttaccctccggtcacc

SEQ ID NO: 4168 - DNA, 27 bp, synthetic construct
  misc_feature 1..27: note = Synthetic polynucleotide encoding artificial human antibody CDR-L3 region
  source 1..27: mol_type = other DNA
caacagagttacagtaccccgtacact

SEQ ID NO: 4169 - DNA, 30 bp, synthetic construct
  misc_feature 1..30: note = Synthetic polynucleotide encoding artificial human antibody CDR-L3 region
  source 1..30: mol_type = other DNA
caacagtatagtagttcttctccaagaacg

SEQ ID NO: 4170 - DNA, 27 bp, synthetic construct
  misc_feature 1..27: note = Synthetic polynucleotide encoding artificial human antibody CDR-L3 region
  source 1..27: mol_type = other DNA
atgcaaagtttacaacttccgattacc

SEQ ID NO: 4171 - DNA, 30 bp, synthetic construct
  misc_feature 1..30: note = Synthetic polynucleotide encoding artificial human antibody CDR-L3 region
  source 1..30: mol_type = other DNA
caacagagttacagtacccgtttactcact

SEQ ID NO: 4172 - DNA, 33 bp, synthetic construct
  misc_feature 1..33: note = Synthetic polynucleotide encoding artificial human antibody CDR-L3 region
  source 1..33: mol_type = other DNA
cagtcctttgacagcagcctgagaggttatgtc

SEQ ID NO: 4173 - DNA, 33 bp, synthetic construct
  misc_feature 1..33: note = Synthetic polynucleotide encoding artificial human antibody CDR-L3 region
  source 1..33: mol_type = other DNA
cagcaccgtatcacctggcctcccctgatcacc

SEQ ID NO: 4174 - DNA, 27 bp, synthetic construct
  misc_feature 1..27: note = Synthetic polynucleotide encoding artificial human antibody CDR-L3 region
  source 1..27: mol_type = other DNA
cagcaatatgcttatgtaccgatcacc

SEQ ID NO: 4175 - DNA, 27 bp, synthetic construct
  misc_feature 1..27: note = Synthetic polynucleotide encoding artificial human antibody CDR-L3 region
  source 1..27: mol_type = other DNA
cagcaatattatagtattcccctcact

SEQ ID NO: 4176 - DNA, 27 bp, synthetic construct
  misc_feature 1..27: note = Synthetic polynucleotide encoding artificial human antibody CDR-L3 region
  source 1..27: mol_type = other DNA
cagcagtatggtagctcacccctgtgg

SEQ ID NO: 4177 - DNA, 30 bp, synthetic construct
  misc_feature 1..30: note = Synthetic polynucleotide encoding artificial human antibody CDR-L3 region
  source 1..30: mol_type = other DNA
agctcatatacaagcagcagcactcaagtc

SEQ ID NO: 4178 - DNA, 33 bp, synthetic construct
  misc_feature 1..33: note = Synthetic polynucleotide encoding artificial human antibody CDR-L3 region
  source 1..33: mol_type = other DNA
tactcaacagacagcagtggtaatcatagggtg

SEQ ID NO: 4179 - DNA, 30 bp, synthetic construct
  misc_feature 1..30: note = Synthetic polynucleotide encoding artificial human antibody CDR-L3 region
  source 1..30: mol_type = other DNA
cagcagtataataactggcctcagtacact

SEQ ID NO: 4180 - DNA, 33 bp, synthetic construct
  misc_feature 1..33: note = Synthetic polynucleotide encoding artificial human antibody CDR-L3 region
  source 1..33: mol_type = other DNA
cagcactttcgtagctcacctcccacgtacact

SEQ ID NO: 4181 - DNA, 30 bp, synthetic construct
  misc_feature 1..30: note = Synthetic polynucleotide encoding artificial human antibody CDR-L3 region
  source 1..30: mol_type = other DNA
agctcatattcaaggaccaccactctcgta

SEQ ID NO: 4182 - DNA, 36 bp, synthetic construct
  misc_feature 1..36: note = Synthetic polynucleotide encoding artificial human antibody CDR-L3 region
  source 1..36: mol_type = other DNA
cagtcctatgacagcggcctgagtgctccttgggtg

SEQ ID NO: 4183 - DNA, 27 bp, synthetic construct
  misc_feature 1..27: note = Synthetic polynucleotide encoding artificial human antibody CDR-L3 region
  source 1..27: mol_type = other DNA
cagcaatatggtaactcacctcccact

SEQ ID NO: 4184 - DNA, 33 bp, synthetic construct
  misc_feature 1..33: note = Synthetic polynucleotide encoding artificial human antibody CDR-L3 region
  source 1..33: mol_type = other DNA
gcaacctgggatgacgacctgagtggtccggtc

SEQ ID NO: 4185 - DNA, 27 bp, synthetic construct
  misc_feature 1..27: note = Synthetic polynucleotide encoding artificial human antibody CDR-L3 region
  source 1..27: mol_type = other DNA
ctacaacatgatactttccctctgacg

SEQ ID NO: 4186 - DNA, 27 bp, synthetic construct
  misc_feature 1..27: note = Synthetic polynucleotide encoding artificial human antibody CDR-L3 region
  source 1..27: mol_type = other DNA
caacagtataatagttattcgtggacg

SEQ ID NO: 4187 - DNA, 27 bp, synthetic construct
  misc_feature 1..27: note = Synthetic polynucleotide encoding artificial human antibody CDR-L3 region
  source 1..27: mol_type = other DNA
caacaccttactagtttcccgtacact

SEQ ID NO: 4188 - DNA, 33 bp, synthetic construct
  misc_feature 1..33: note = Synthetic polynucleotide encoding artificial human antibody CDR-L3 region
  source 1..33: mol_type = other DNA
ggctcccgggacagtagtggtaacccttctgtc

SEQ ID NO: 4189 - DNA, 27 bp, synthetic construct
  misc_feature 1..27: note = Synthetic polynucleotide encoding artificial human antibody CDR-L3 region
  source 1..27: mol_type = other DNA
cagcagcgtagcaactggctgtacact

SEQ ID NO: 4190 - DNA, 36 bp, synthetic construct
  misc_feature 1..36: note = Synthetic polynucleotide encoding artificial human antibody CDR-L3 region
  source 1..36: mol_type = other DNA
caggtgtgggatagtagtagtgatcatcaagaggta

SEQ ID NO: 4191 - DNA, 30 bp, synthetic construct
  misc_feature 1..30: note = Synthetic polynucleotide encoding artificial human antibody CDR-L3 region
  source 1..30: mol_type = other DNA
tgctcatatgcacctagtaacacttatgtc

SEQ ID NO: 4192 - DNA, 27 bp, synthetic construct
  misc_feature 1..27: note = Synthetic polynucleotide encoding artificial human antibody CDR-L3 region
  source 1..27: mol_type = other DNA
cagcagcgtagcaactggcctctcact

SEQ ID NO: 4193 - DNA, 36 bp, synthetic construct
  misc_feature 1..36: note = Synthetic polynucleotide encoding artificial human antibody CDR-L3 region
  source 1..36: mol_type = other DNA
aactcccgagacagcagtgctcatgaccatctgtta

SEQ ID NO: 4194 - DNA, 30 bp, synthetic construct
  misc_feature 1..30: note = Synthetic polynucleotide encoding artificial human antibody CDR-L3 region
  source 1..30: mol_type = other DNA
caacactttggtgactcacccttgtacatt

SEQ ID NO: 4195 - DNA, 27 bp, synthetic construct
  misc_feature 1..27: note = Synthetic polynucleotide encoding artificial human antibody CDR-L3 region
  source 1..27: mol_type = other DNA
caggtgtgggacagcagtactgcggtg

SEQ ID NO: 4196 - DNA, 33 bp, synthetic construct
  misc_feature 1..33: note = Synthetic polynucleotide encoding artificial human antibody CDR-L3 region
  source 1..33: mol_type = other DNA
caggtgtgggatagtagtagtgatcatgtggta

SEQ ID NO: 4197 - DNA, 33 bp, synthetic construct
  misc_feature 1..33: note = Synthetic polynucleotide encoding artificial human antibody CDR-L3 region
  source 1..33: mol_type = other DNA
caatcagcagacagcagtggtttttatgtggta

SEQ ID NO: 4198 - DNA, 27 bp, synthetic construct
  misc_feature 1..27: note = Synthetic polynucleotide encoding artificial human antibody CDR-L3 region
  source 1..27: mol_type = other DNA
caatcagcagacagcagtagtcccgtg

SEQ ID NO: 4199 - DNA, 30 bp, synthetic construct
  misc_feature 1..30: note = Synthetic polynucleotide encoding artificial human antibody CDR-L3 region
  source 1..30: mol_type = other DNA
tactcaacagacagtagggctaccggggtt

SEQ ID NO: 4200 - DNA, 27 bp, synthetic construct
  misc_feature 1..27: note = Synthetic polynucleotide encoding artificial human antibody CDR-L3 region
  source 1..27: mol_type = other DNA
caacagagttacagtacccctcagacg

SEQ ID NO: 4201 - DNA, 27 bp, synthetic construct
  misc_feature 1..27: note = Synthetic polynucleotide encoding artificial human antibody CDR-L3 region
  source 1..27: mol_type = other DNA
caacagtatgaaaatctcccgctcact

SEQ ID NO: 4202 - DNA, 27 bp, synthetic construct
  misc_feature 1..27: note = Synthetic polynucleotide encoding artificial human antibody CDR-L3 region
  source 1..27: mol_type = other DNA
caacagtttgataatctcccgctcact

SEQ ID NO: 4203 - DNA, 30 bp, synthetic construct
  misc_feature 1..30: note = Synthetic polynucleotide encoding artificial human antibody CDR-L3 region
  source 1..30: mol_type = other DNA
tcctcatatgcaggcagctacacttgggtg

SEQ ID NO: 4204 - DNA, 27 bp, synthetic construct
  misc_feature 1..27: note = Synthetic polynucleotide encoding artificial human antibody CDR-L3 region
  source 1..27: mol_type = other DNA
caggcgtgggacagcagcactgtggta

SEQ ID NO: 4205 - DNA, 33 bp, synthetic construct
  misc_feature 1..33: note = Synthetic polynucleotide encoding artificial human antibody CDR-L3 region
  source 1..33: mol_type = other DNA
ggaacatgggatagcagcctgggtgcttatgtc

SEQ ID NO: 4206 - DNA, 24 bp, synthetic construct
  misc_feature 1..24: note = Synthetic polynucleotide encoding artificial human antibody CDR-L3 region
  source 1..24: mol_type = other DNA
cagcagtatggtagctcactcact

SEQ ID NO: 4207 - DNA, 27 bp, synthetic construct
  misc_feature 1..27: note = Synthetic polynucleotide encoding artificial human antibody CDR-L3 region
  source 1..27: mol_type = other DNA
cagcagtatggtagctcacctctcact

SEQ ID NO: 4208 - DNA, 30 bp, synthetic construct
  misc_feature 1..30: note = Synthetic polynucleotide encoding artificial human antibody CDR-L3 region
  source 1..30: mol_type = other DNA
agctcatatacaagcagcaggagtctggtg

SEQ ID NO: 4209 - DNA, 27 bp, synthetic construct
  misc_feature 1..27: note = Synthetic polynucleotide encoding artificial human antibody CDR-L3 region
  source 1..27: mol_type = other DNA
caacagacttacagcaccccgtggacg

SEQ ID NO: 4210 - DNA, 24 bp, synthetic construct
  misc_feature 1..24: note = Synthetic polynucleotide encoding artificial human antibody CDR-L3 region
  source 1..24: mol_type = other DNA
caacaatataataattggctcact

SEQ ID NO: 4211 - DNA, 27 bp, synthetic construct
  misc_feature 1..27: note = Synthetic polynucleotide encoding artificial human antibody CDR-L3 region
  source 1..27: mol_type = other DNA
tactctacgcctgacaacaatggggtg

SEQ ID NO: 4212 - DNA, 30 bp, synthetic construct
  misc_feature 1..30: note = Synthetic polynucleotide encoding artificial human antibody CDR-L3 region
  source 1..30: mol_type = other DNA
agctcatatacaacctccaacagtgtggtg

SEQ ID NO: 4213 - DNA, 27 bp, synthetic construct
  misc_feature 1..27: note = Synthetic polynucleotide encoding artificial human antibody CDR-L3 region
  source 1..27: mol_type = other DNA
cagcagtatgataactcacctctcact

SEQ ID NO: 4214 - DNA, 27 bp, synthetic construct
  misc_feature 1..27: note = Synthetic polynucleotide encoding artificial human antibody CDR-L3 region
  source 1..27: mol_type = other DNA
cagcaatattggggtactccgtacact

SEQ ID NO: 4215 - DNA, 30 bp, synthetic construct
  misc_feature 1..30: note = Synthetic polynucleotide encoding artificial human antibody CDR-L3 region
  source 1..30: mol_type = other DNA
cagtcctatgacagtggcctgggggtggta

SEQ ID NO: 4216 - DNA, 30 bp, synthetic construct
  misc_feature 1..30: note = Synthetic polynucleotide encoding artificial human antibody CDR-L3 region
  source 1..30: mol_type = other DNA
agctcatatgcaggcatcaacaatttggtt

SEQ ID NO: 4217 - DNA, 27 bp, synthetic construct
  misc_feature 1..27: note = Synthetic polynucleotide encoding artificial human antibody CDR-L3 region
  source 1..27: mol_type = other DNA
caacagtataatagttattctcagacg

SEQ ID NO: 4218 - DNA, 27 bp, synthetic construct
  misc_feature 1..27: note = Synthetic polynucleotide encoding artificial human antibody CDR-L3 region
  source 1..27: mol_type = other DNA
cagcagtatactgactggccgtacact

SEQ ID NO: 4219 - DNA, 24 bp, synthetic construct
  misc_feature 1..24: note = Synthetic polynucleotide encoding artificial human antibody CDR-L3 region
  source 1..24: mol_type = other DNA
cagacctggggcactgttggcgtg

SEQ ID NO: 4220 - DNA, 27 bp, synthetic construct
  misc_feature 1..27: note = Synthetic polynucleotide encoding artificial human antibody CDR-L3 region
  source 1..27: mol_type = other DNA
cagcagtatggtagctcaccgtggacg

SEQ ID NO: 4221 - DNA, 33 bp, synthetic construct
  misc_feature 1..33: note = Synthetic polynucleotide encoding artificial human antibody CDR-L3 region
  source 1..33: mol_type = other DNA
cagtcttatgacagcagcctgagtggttatgtc

SEQ ID NO: 4222 - DNA, 33 bp, synthetic construct
  misc_feature 1..33: note = Synthetic polynucleotide encoding artificial human antibody CDR-L3 region
  source 1..33: mol_type = other DNA
cagtgttttgacaccagcctgactgcaaaggtg

SEQ ID NO: 4223 - DNA, 27 bp, synthetic construct
  misc_feature 1..27: note = Synthetic polynucleotide encoding artificial human antibody CDR-L3 region
  source 1..27: mol_type = other DNA
atgcaagctctacaagttcctcggacg

SEQ ID NO: 4224 - DNA, 27 bp, synthetic construct
  misc_feature 1..27: note = Synthetic polynucleotide encoding artificial human antibody CDR-L3 region
  source 1..27: mol_type = other DNA
caacaacttaatagttacccgctcact

SEQ ID NO: 4225 - DNA, 33 bp, synthetic construct
  misc_feature 1..33: note = Synthetic polynucleotide encoding artificial human antibody CDR-L3 region
  source 1..33: mol_type = other DNA
gcagcatgggatgacagcctgagtggtccggtg

SEQ ID NO: 4226 - DNA, 27 bp, synthetic construct
  misc_feature 1..27: note = Synthetic polynucleotide encoding artificial human antibody CDR-L3 region
  source 1..27: mol_type = other DNA
atgcaagctctgcaaactccgtggacg

SEQ ID NO: 4227 - DNA, 36 bp, synthetic construct
  misc_feature 1..36: note = Synthetic polynucleotide encoding artificial human antibody CDR-L3 region
  source 1..36: mol_type = other DNA
aactcccgggacagcagtgatgaccatctggaagta

SEQ ID NO: 4228 - DNA, 27 bp, synthetic construct
  misc_feature 1..27: note = Synthetic polynucleotide encoding artificial human antibody CDR-L3 region
  source 1..27: mol_type = other DNA
caacagtataatagttacccgaggacg

SEQ ID NO: 4229 - DNA, 27 bp, synthetic construct
  misc_feature 1..27: note = Synthetic polynucleotide encoding artificial human antibody CDR-L3 region
  source 1..27: mol_type = other DNA
cagcaatattttactactcctcgcacg

SEQ ID NO: 4230 - DNA, 36 bp, synthetic construct
  misc_feature 1..36: note = Synthetic polynucleotide encoding artificial human antibody CDR-L3 region
  source 1..36: mol_type = other DNA
gcagcatgggatgacggcctgggtggcctttatgtg

SEQ ID NO: 4231 - DNA, 24 bp, synthetic construct
  misc_feature 1..24: note = Synthetic polynucleotide encoding artificial human antibody CDR-L3 region
  source 1..24: mol_type = other DNA
caacagtataatagggggtccact

SEQ ID NO: 4232 - DNA, 33 bp, synthetic construct
  misc_feature 1..33: note = Synthetic polynucleotide encoding artificial human antibody CDR-L3 region
  source 1..33: mol_type = other DNA
caggtgtgggacaggaatagtcatcgtgtgatt

SEQ ID NO: 4233 - DNA, 33 bp, synthetic construct
  misc_feature 1..33: note = Synthetic polynucleotide encoding artificial human antibody CDR-L3 region
  source 1..33: mol_type = other DNA
cagtcctatgacaacagtctgagtgcttgggtg

SEQ ID NO: 4234 - DNA, 33 bp, synthetic construct
  misc_feature 1..33: note = Synthetic polynucleotide encoding artificial human antibody CDR-L3 region
  source 1..33: mol_type = other DNA
aactcccgggacagcagtggtaaccattgggtg

SEQ ID NO: 4235 - DNA, 33 bp, synthetic construct
  misc_feature 1..33: note = Synthetic polynucleotide encoding artificial human antibody CDR-L3 region
  source 1..33: mol_type = other DNA
agctcatatataaggagcagcactcctgtggta

SEQ ID NO: 4236 - DNA, 27 bp, synthetic construct
  misc_feature 1..27: note = Synthetic polynucleotide encoding artificial human antibody CDR-L3 region
  source 1..27: mol_type = other DNA
cagcagtattatgatactccctacact

SEQ ID NO: 4237 - DNA, 30 bp, synthetic construct
  misc_feature 1..30: note = Synthetic polynucleotide encoding artificial human antibody CDR-L3 region
  source 1..30: mol_type = other DNA
agctcatatacaagcagcagcactctggtg

SEQ ID NO: 4238 - DNA, 24 bp, synthetic construct
  misc_feature 1..24: note = Synthetic polynucleotide encoding artificial human antibody CDR-L3 region
  source 1..24: mol_type = other DNA
caacagtatgataatctctggacg

SEQ ID NO: 4239 - DNA, 36 bp, synthetic construct
  misc_feature 1..36: note = Synthetic polynucleotide encoding artificial human antibody CDR-L3 region
  source 1..36: mol_type = other DNA
caggtgtgggatagtagtagtgatcatctttatgtc

SEQ ID NO: 4240 - DNA, 27 bp, synthetic construct
  misc_feature 1..27: note = Synthetic polynucleotide encoding artificial human antibody CDR-L3 region
  source 1..27: mol_type = other DNA
caccagtatggtagctcaccaaggacg

SEQ ID NO: 4241 - DNA, 36 bp, synthetic construct
  misc_feature 1..36: note = Synthetic polynucleotide encoding artificial human antibody CDR-L3 region
  source 1..36: mol_type = other DNA
ggaacatgggacagcagcctgactggtggttttgtc

SEQ ID NO: 4242 - DNA, 33 bp, synthetic construct
  misc_feature 1..33: note = Synthetic polynucleotide encoding artificial human antibody CDR-L3 region
  source 1..33: mol_type = other DNA
caggtgtgggacacttctaatgatgtgggggtg

SEQ ID NO: 4243 - DNA, 27 bp, synthetic construct
  misc_feature 1..27: note = Synthetic polynucleotide encoding artificial human antibody CDR-L3 region
  source 1..27: mol_type = other DNA
cagcagtatggtagctcacctccgact

SEQ ID NO: 4244 - DNA, 30 bp, synthetic construct
  misc_feature 1..30: note = Synthetic polynucleotide encoding artificial human antibody CDR-L3 region
  source 1..30: mol_type = other DNA
tgctcatatgcaggtagtagcaattgggtg

SEQ ID NO: 4245 - DNA, 24 bp, synthetic construct
  misc_feature 1..24: note = Synthetic polynucleotide encoding artificial human antibody CDR-L3 region
  source 1..24: mol_type = other DNA
atgcaaggtacacactggtccgct

SEQ ID NO: 4246 - DNA, 33 bp, synthetic construct
  misc_feature 1..33: note = Synthetic polynucleotide encoding artificial human antibody CDR-L3 region
  source 1..33: mol_type = other DNA
gcagcatgggatgacagcctgagtggtcaggtg

SEQ ID NO: 4247 - DNA, 30 bp, synthetic construct
  misc_feature 1..30: note = Synthetic polynucleotide encoding artificial human antibody CDR-L3 region
  source 1..30: mol_type = other DNA
aactcccgggacagcagtggtaaccatgtc

SEQ ID NO: 4248 - DNA, 24 bp, synthetic construct
  misc_feature 1..24: note = Synthetic polynucleotide encoding artificial human antibody CDR-L3 region
  source 1..24: mol_type = other DNA
caacagagttacagtactcccacc

SEQ ID NO: 4249 - DNA, 33 bp, synthetic construct
  misc_feature 1..33: note = Synthetic polynucleotide encoding artificial human antibody CDR-L3 region
  source 1..33: mol_type = other DNA
caggtgtgggaaagtggtggtgatcatccggtg

SEQ ID NO: 4250 - DNA, 27 bp, synthetic construct
  misc_feature 1..27: note = Synthetic polynucleotide encoding artificial human antibody CDR-L3 region
  source 1..27: mol_type = other DNA
ctacagcataataattacccgttgacg

SEQ ID NO: 4251 - DNA, 27 bp, synthetic construct
  misc_feature 1..27: note = Synthetic polynucleotide encoding artificial human antibody CDR-L3 region
  source 1..27: mol_type = other DNA
caacagtataatagttatccgtacact

SEQ ID NO: 4252 - DNA, 27 bp, synthetic construct
  misc_feature 1..27: note = Synthetic polynucleotide encoding artificial human antibody CDR-L3 region
  source 1..27: mol_type = other DNA
atgcaagctctacagatcccccggacg

SEQ ID NO: 4253 - DNA, 27 bp, synthetic construct
  misc_feature 1..27: note = Synthetic polynucleotide encoding artificial human antibody CDR-L3 region
  source 1..27: mol_type = other DNA
caggcgtgggacagcaacgtccatgtc

SEQ ID NO: 4254 - DNA, 33 bp, synthetic construct
  misc_feature 1..33: note = Synthetic polynucleotide encoding artificial human antibody CDR-L3 region
  source 1..33: mol_type = other DNA
tactcaacagacagcagtggtaatgtctgggtg

SEQ ID NO: 4255 - DNA, 33 bp, synthetic construct
  misc_feature 1..33: note = Synthetic polynucleotide encoding artificial human antibody CDR-L3 region
  source 1..33: mol_type = other DNA
aactcccgggacagcagtggtaacctttatgtc

SEQ ID NO: 4256 - DNA, 27 bp, synthetic construct
  misc_feature 1..27: note = Synthetic polynucleotide encoding artificial human antibody CDR-L3 region
  source 1..27: mol_type = other DNA
cagcaatattatagtagtcctctcact

SEQ ID NO: 4257 - DNA, 30 bp, synthetic construct
  misc_feature 1..30: note = Synthetic polynucleotide encoding artificial human antibody CDR-L3 region
  source 1..30: mol_type = other DNA
atgcaagctctacaaactcccccgtacact

SEQ ID NO: 4258 - DNA, 30 bp, synthetic construct
  misc_feature 1..30: note = Synthetic polynucleotide encoding artificial human antibody CDR-L3 region
  source 1..30: mol_type = other DNA
agctcatatacaagcagcagcacttgggtg

SEQ ID NO: 4259 - DNA, 27 bp, synthetic construct
  misc_feature 1..27: note = Synthetic polynucleotide encoding artificial human antibody CDR-L3 region
  source 1..27: mol_type = other DNA
cagcaaagttacagtactccgtacacc

SEQ ID NO: 4260 - DNA, 33 bp, synthetic construct
  misc_feature 1..33: note = Synthetic polynucleotide encoding artificial human antibody CDR-L3 region
  source 1..33: mol_type = other DNA
tgctcatatgcaggtagtagcactccttgggtg

SEQ ID NO: 4261 - DNA, 33 bp, synthetic construct
  misc_feature 1..33: note = Synthetic polynucleotide encoding artificial human antibody CDR-L3 region
  source 1..33: mol_type = other DNA
tactcaccagacagcagtggtaatgtttgggtg

SEQ ID NO: 4262 - DNA, 15 bp, synthetic construct
  misc_feature 1..15: note = Synthetic polynucleotide encoding artificial human antibody CDR-L3 region
  source 1..15: mol_type = other DNA
cagtcccggggcact

SEQ ID NO: 4263 - DNA, 27 bp, synthetic construct
  misc_feature 1..27: note = Synthetic polynucleotide encoding artificial human antibody CDR-L3 region
  source 1..27: mol_type = other DNA
cagcagtatggtagctcacattacact

SEQ ID NO: 4264 - DNA, 36 bp, synthetic construct
  misc_feature 1..36: note = Synthetic polynucleotide encoding artificial human antibody CDR-L3 region
  source 1..36: mol_type = other DNA
caggtgtgggatagtagtagtgatcatccttgggtg

SEQ ID NO: 4265 - DNA, 33 bp, synthetic construct
  misc_feature 1..33: note = Synthetic polynucleotide encoding artificial human antibody CDR-L3 region
  source 1..33: mol_type = other DNA
tgctcgtatagaagtagtacggctcccgtggtc

SEQ ID NO: 4266 - DNA, 27 bp, synthetic construct
  misc_feature 1..27: note = Synthetic polynucleotide encoding artificial human antibody CDR-L3 region
  source 1..27: mol_type = other DNA
cagcaatattttagtactccgtggacg

SEQ ID NO: 4267 - DNA, 33 bp, synthetic construct
  misc_feature 1..33: note = Synthetic polynucleotide encoding artificial human antibody CDR-L3 region
  source 1..33: mol_type = other DNA
caggtgtgggatggttatagtgatccattggta

SEQ ID NO: 4268 - DNA, 27 bp, synthetic construct
  misc_feature 1..27: note = Synthetic polynucleotide encoding artificial human antibody CDR-L3 region
  source 1..27: mol_type = other DNA
caacagagttactatacccctcccact

SEQ ID NO: 4269 - DNA, 36 bp, synthetic construct
  misc_feature 1..36: note = Synthetic polynucleotide encoding artificial human antibody CDR-L3 region
  source 1..36: mol_type = other DNA
gcagcatgggatgacagcctgaatgggctttgggtg

SEQ ID NO: 4270 - DNA, 30 bp, synthetic construct
  misc_feature 1..30: note = Synthetic polynucleotide encoding artificial human antibody CDR-L3 region
  source 1..30: mol_type = other DNA
cagtcttctgacagcaacaatcatgtggtc

SEQ ID NO: 4271 - DNA, 33 bp, synthetic construct
  misc_feature 1..33: note = Synthetic polynucleotide encoding artificial human antibody CDR-L3 region
  source 1..33: mol_type = other DNA
cagtcctatgacagcagcctgagtggtgtgcta

SEQ ID NO: 4272 - DNA, 27 bp, synthetic construct
  misc_feature 1..27: note = Synthetic polynucleotide encoding artificial human antibody CDR-L3 region
  source 1..27: mol_type = other DNA
caacagagttacagtacccccttcact

SEQ ID NO: 4273 - DNA, 27 bp, synthetic construct
  misc_feature 1..27: note = Synthetic polynucleotide encoding artificial human antibody CDR-L3 region
  source 1..27: mol_type = other DNA
caacagtatgatagtctccctctcact

SEQ ID NO: 4274 - DNA, 30 bp, synthetic construct
  misc_feature 1..30: note = Synthetic polynucleotide encoding artificial human antibody CDR-L3 region
  source 1..30: mol_type = other DNA
cagtactatggtggctcaccgggattcact

SEQ ID NO: 4275 - DNA, 30 bp, synthetic construct
  misc_feature 1..30: note = Synthetic polynucleotide encoding artificial human antibody CDR-L3 region
  source 1..30: mol_type = other DNA
tgctcatatgcaggtagtagcacttatgtc

SEQ ID NO: 4276 - DNA, 30 bp, synthetic construct
  misc_feature 1..30: note = Synthetic polynucleotide encoding artificial human antibody CDR-L3 region
  source 1..30: mol_type = other DNA
caggagtatgttaaatcacctggattcgct

SEQ ID NO: 4277 - DNA, 27 bp, synthetic construct
  misc_feature 1..27: note = Synthetic polynucleotide encoding artificial human antibody CDR-L3 region
  source 1..27: mol_type = other DNA
cagcagtatggtacttcacctcagacg

SEQ ID NO: 4278 - DNA, 30 bp, synthetic construct
  misc_feature 1..30: note = Synthetic polynucleotide encoding artificial human antibody CDR-L3 region
  source 1..30: mol_type = other DNA
atgttgtatatgggtagtggcatttcgctc

SEQ ID NO: 4279 - DNA, 36 bp, synthetic construct
  misc_feature 1..36: note = Synthetic polynucleotide encoding artificial human antibody CDR-L3 region
  source 1..36: mol_type = other DNA
cagtccaatgacatcagcctgagtggttctgtggta

SEQ ID NO: 4280 - DNA, 33 bp, synthetic construct
  misc_feature 1..33: note = Synthetic polynucleotide encoding artificial human antibody CDR-L3 region
  source 1..33: mol_type = other DNA
caatcctatgacaatagcctgagtgggggggtg

SEQ ID NO: 4281 - DNA, 27 bp, synthetic construct
  misc_feature 1..27: note = Synthetic polynucleotide encoding artificial human antibody CDR-L3 region
  source 1..27: mol_type = other DNA
cagcagtttgatatttcacccttcact

SEQ ID NO: 4282 - DNA, 30 bp, synthetic construct
  misc_feature 1..30: note = Synthetic polynucleotide encoding artificial human antibody CDR-L3 region
  source 1..30: mol_type = other DNA
agctcatatacaagcagcagctccttggtg

SEQ ID NO: 4283 - DNA, 30 bp, synthetic construct
  misc_feature 1..30: note = Synthetic polynucleotide encoding artificial human antibody CDR-L3 region
  source 1..30: mol_type = other DNA
tgctcatttacaggtactagcacttttgtc

SEQ ID NO: 4284 - DNA, 27 bp, synthetic construct
  misc_feature 1..27: note = Synthetic polynucleotide encoding artificial human antibody CDR-L3 region
  source 1..27: mol_type = other DNA
cagcaatattatagtactccgtacact

SEQ ID NO: 4285 - DNA, 33 bp, synthetic construct
  misc_feature 1..33: note = Synthetic polynucleotide encoding artificial human antibody CDR-L3 region
  source 1..33: mol_type = other DNA
gcaacatgggatgacagcctgaatggaggggtg

SEQ ID NO: 4286 - DNA, 27 bp, synthetic construct
  misc_feature 1..27: note = Synthetic polynucleotide encoding artificial human antibody CDR-L3 region
  source 1..27: mol_type = other DNA
tggctcatctctggtggtgcccctgta

SEQ ID NO: 4287 - DNA, 33 bp, synthetic construct
  misc_feature 1..33: note = Synthetic polynucleotide encoding artificial human antibody CDR-L3 region
  source 1..33: mol_type = other DNA
cagtcctttgacagcagcctgagtcgttctgtc

SEQ ID NO: 4288 - DNA, 27 bp, synthetic construct
  misc_feature 1..27: note = Synthetic polynucleotide encoding artificial human antibody CDR-L3 region
  source 1..27: mol_type = other DNA
cagcagcgtaacaactggcctatcact

SEQ ID NO: 4289 - DNA, 27 bp, synthetic construct
  misc_feature 1..27: note = Synthetic polynucleotide encoding artificial human antibody CDR-L3 region
  source 1..27: mol_type = other DNA
ctacaagattacaattaccctccgacg

SEQ ID NO: 4290 - DNA, 33 bp, synthetic construct
  misc_feature 1..33: note = Synthetic polynucleotide encoding artificial human antibody CDR-L3 region
  source 1..33: mol_type = other DNA
aactcccgggacagcagcggtcaccattgggtg

SEQ ID NO: 4291 - DNA, 27 bp, synthetic construct
  misc_feature 1..27: note = Synthetic polynucleotide encoding artificial human antibody CDR-L3 region
  source 1..27: mol_type = other DNA
cagcaatattattctactccatacact

SEQ ID NO: 4292 - DNA, 30 bp, synthetic construct
  misc_feature 1..30: note = Synthetic polynucleotide encoding artificial human antibody CDR-L3 region
  source 1..30: mol_type = other DNA
atgcaaggtgcacactggcctccaatcacc

SEQ ID NO: 4293 - DNA, 30 bp, synthetic construct
  misc_feature 1..30: note = Synthetic polynucleotide encoding artificial human antibody CDR-L3 region
  source 1..30: mol_type = other DNA
tactcaacagacactattggaaattgggtg

SEQ ID NO: 4294 - DNA, 33 bp, synthetic construct
  misc_feature 1..33: note = Synthetic polynucleotide encoding artificial human antibody CDR-L3 region
  source 1..33: mol_type = other DNA
caggtgtgggatagtagtagtgatcattggatt

SEQ ID NO: 4295 - DNA, 27 bp, synthetic construct
  misc_feature 1..27: note = Synthetic polynucleotide encoding artificial human antibody CDR-L3 region
  source 1..27: mol_type = other DNA
caacagagttacagtccccctctcact

SEQ ID NO: 4296 - DNA, 30 bp, synthetic construct
  misc_feature 1..30: note = Synthetic polynucleotide encoding artificial human antibody CDR-L3 region
  source 1..30: mol_type = other DNA
cagcattatagtgactggcgagcactcact

SEQ ID NO: 4297 - DNA, 27 bp, synthetic construct
  misc_feature 1..27: note = Synthetic polynucleotide encoding artificial human antibody CDR-L3 region
  source 1..27: mol_type = other DNA
caacaatattatggtcctctgtggacg

SEQ ID NO: 4298 - DNA, 33 bp, synthetic construct
  misc_feature 1..33: note = Synthetic polynucleotide encoding artificial human antibody CDR-L3 region
  source 1..33: mol_type = other DNA
caatcagcagacagcagtcttacttattggctc

SEQ ID NO: 4299 - DNA, 24 bp, synthetic construct
  misc_feature 1..24: note = Synthetic polynucleotide encoding artificial human antibody CDR-L3 region
  source 1..24: mol_type = other DNA
caacaatattccgattactccact

SEQ ID NO: 4300 - DNA, 27 bp, synthetic construct
  misc_feature 1..27: note = Synthetic polynucleotide encoding artificial human antibody CDR-L3 region
  source 1..27: mol_type = other DNA
caccaatattatactactcctttcact

SEQ ID NO: 4301 - DNA, 27 bp, synthetic construct
  misc_feature 1..27: note = Synthetic polynucleotide encoding artificial human antibody CDR-L3 region
  source 1..27: mol_type = other DNA
caggcgtgggacagcagcactgcagaa

SEQ ID NO: 4302 - DNA, 33 bp, synthetic construct
  misc_feature 1..33: note = Synthetic polynucleotide encoding artificial human antibody CDR-L3 region
  source 1..33: mol_type = other DNA
gtgacatgggatgacgacctgcatggttgggtg

SEQ ID NO: 4303 - DNA, 39 bp, synthetic construct
  misc_feature 1..39: note = Synthetic polynucleotide encoding artificial human antibody CDR-L3 region
  source 1..39: mol_type = other DNA
gcaacgtgggatagcagcctgcgtgctggccctgtagta

SEQ ID NO: 4304 - DNA, 27 bp, synthetic construct
  misc_feature 1..27: note = Synthetic polynucleotide encoding artificial human antibody CDR-L3 region
  source 1..27: mol_type = other DNA
caacagtacaatgcttacccggtcact

SEQ ID NO: 4305 - DNA, 27 bp, synthetic construct
  misc_feature 1..27: note = Synthetic polynucleotide encoding artificial human antibody CDR-L3 region
  source 1..27: mol_type = other DNA
caacaatattatagtactccgtggacg

SEQ ID NO: 4306 - DNA, 27 bp, synthetic construct
  misc_feature 1..27: note = Synthetic polynucleotide encoding artificial human antibody CDR-L3 region
  source 1..27: mol_type = other DNA
cagcaatattatagtcctcctctcact

SEQ ID NO: 4307 - DNA, 30 bp, synthetic construct
  misc_feature 1..30: note = Synthetic polynucleotide encoding artificial human antibody CDR-L3 region
  source 1..30: mol_type = other DNA
tgctcatatacaagcagcctcacttatgtc

SEQ ID NO: 4308 - DNA, 27 bp, synthetic construct
  misc_feature 1..27: note = Synthetic polynucleotide encoding artificial human antibody CDR-L3 region
  source 1..27: mol_type = other DNA
atgcaaggtacacactggccgtacact

SEQ ID NO: 4309 - DNA, 27 bp, synthetic construct
  misc_feature 1..27: note = Synthetic polynucleotide encoding artificial human antibody CDR-L3 region
  source 1..27: mol_type = other DNA
caggcgtgggacagcagcacttatgtc

SEQ ID NO: 4310 - DNA, 30 bp, synthetic construct
  misc_feature 1..30: note = Synthetic polynucleotide encoding artificial human antibody CDR-L3 region
  source 1..30: mol_type = other DNA
cagcagtatggtggctcacctctattcact

SEQ ID NO: 4311 - DNA, 27 bp, synthetic construct
  misc_feature 1..27: note = Synthetic polynucleotide encoding artificial human antibody CDR-L3 region
  source 1..27: mol_type = other DNA
cagacgtgggacagcagcactgtgata

SEQ ID NO: 4312 - DNA, 27 bp, synthetic construct
  misc_feature 1..27: note = Synthetic polynucleotide encoding artificial human antibody CDR-L3 region
  source 1..27: mol_type = other DNA
atgcaagctctacaaactccgtacact

SEQ ID NO: 4313 - DNA, 33 bp, synthetic construct
  misc_feature 1..33: note = Synthetic polynucleotide encoding artificial human antibody CDR-L3 region
  source 1..33: mol_type = other DNA
ggaacatgggatagcagtctgagtgctggcgtc

SEQ ID NO: 4314 - DNA, 24 bp, synthetic construct
  misc_feature 1..24: note = Synthetic polynucleotide encoding artificial human antibody CDR-L3 region
  source 1..24: mol_type = other DNA
caacagtataatagttattggacg

SEQ ID NO: 4315 - DNA, 27 bp, synthetic construct
  misc_feature 1..27: note = Synthetic polynucleotide encoding artificial human antibody CDR-L3 region
  source 1..27: mol_type = other DNA
caacagtataatagttatccgtggacg

SEQ ID NO: 4316 - DNA, 36 bp, synthetic construct
  misc_feature 1..36: note = Synthetic polynucleotide encoding artificial human antibody CDR-L3 region
  source 1..36: mol_type = other DNA
cagtcctatgacagcagcctgagtggttcaggggtg

SEQ ID NO: 4317 - DNA, 30 bp, synthetic construct
  misc_feature 1..30: note = Synthetic polynucleotide encoding artificial human antibody CDR-L3 region
  source 1..30: mol_type = other DNA
caatcagcagacagcagtggtacttatgtc

SEQ ID NO: 4318 - DNA, 27 bp, synthetic construct
  misc_feature 1..27: note = Synthetic polynucleotide encoding artificial human antibody CDR-L3 region
  source 1..27: mol_type = other DNA
caacaggctcacggtttcccaatcact

SEQ ID NO: 4319 - DNA, 24 bp, synthetic construct
  misc_feature 1..24: note = Synthetic polynucleotide encoding artificial human antibody CDR-L3 region
  source 1..24: mol_type = other DNA
cagcagtataatagctggcccgct

SEQ ID NO: 4320 - DNA, 27 bp, synthetic construct
  misc_feature 1..27: note = Synthetic polynucleotide encoding artificial human antibody CDR-L3 region
  source 1..27: mol_type = other DNA
caacagagttacaataccccgtacact

SEQ ID NO: 4321 - DNA, 27 bp, synthetic construct
  misc_feature 1..27: note = Synthetic polynucleotide encoding artificial human antibody CDR-L3 region
  source 1..27: mol_type = other DNA
caacagagttacaataccccgctcact

SEQ ID NO: 4322 - DNA, 30 bp, synthetic construct
  misc_feature 1..30: note = Synthetic polynucleotide encoding artificial human antibody CDR-L3 region
  source 1..30: mol_type = other DNA
cagcagtatggtagctcacctccgaacagt

SEQ ID NO: 4323 - DNA, 33 bp, synthetic construct
  misc_feature 1..33: note = Synthetic polynucleotide encoding artificial human antibody CDR-L3 region
  source 1..33: mol_type = other DNA
caggtgtgggatagtagtagtgatcatccggta

SEQ ID NO: 4324 - DNA, 30 bp, synthetic construct
  misc_feature 1..30: note = Synthetic polynucleotide encoding artificial human antibody CDR-L3 region
  source 1..30: mol_type = other DNA
cagtcttatgatagcaacactcattgggtg

SEQ ID NO: 4325 - DNA, 27 bp, synthetic construct
  misc_feature 1..27: note = Synthetic polynucleotide encoding artificial human antibody CDR-L3 region
  source 1..27: mol_type = other DNA
atgcaagctctagaaactcctcgcact

SEQ ID NO: 4326 - DNA, 24 bp, synthetic construct
  misc_feature 1..24: note = Synthetic polynucleotide encoding artificial human antibody CDR-L3 region
  source 1..24: mol_type = other DNA
caacagtataatagttattcgacg

SEQ ID NO: 4327 - DNA, 27 bp, synthetic construct
  misc_feature 1..27: note = Synthetic polynucleotide encoding artificial human antibody CDR-L3 region
  source 1..27: mol_type = other DNA
atgcaagctctacaacctccgtacact

SEQ ID NO: 4328 - DNA, 30 bp, synthetic construct
  misc_feature 1..30: note = Synthetic polynucleotide encoding artificial human antibody CDR-L3 region
  source 1..30: mol_type = other DNA
caacagagttacagtacccctccgtggacg

SEQ ID NO: 4329 - DNA, 27 bp, synthetic construct
  misc_feature 1..27: note = Synthetic polynucleotide encoding artificial human antibody CDR-L3 region
  source 1..27: mol_type = other DNA
cagcaatattatcttgttcccgtcacc

SEQ ID NO: 4330 - DNA, 36 bp, synthetic construct
  misc_feature 1..36: note = Synthetic polynucleotide encoding artificial human antibody CDR-L3 region
  source 1..36: mol_type = other DNA
gcagcatgggatgacagcctgagtggcccttatgtc

SEQ ID NO: 4331 - DNA, 33 bp, synthetic construct
  misc_feature 1..33: note = Synthetic polynucleotide encoding artificial human antibody CDR-L3 region
  source 1..33: mol_type = other DNA
agctcatatgcaggcagcaacaatttttatgtc

SEQ ID NO: 4332 - DNA, 36 bp, synthetic construct
  misc_feature 1..36: note = Synthetic polynucleotide encoding artificial human antibody CDR-L3 region
  source 1..36: mol_type = other DNA
cagtcctatgacagcagcctgagtggttcaatgata

SEQ ID NO: 4333 - DNA, 24 bp, synthetic construct
  misc_feature 1..24: note = Synthetic polynucleotide encoding artificial human antibody CDR-L3 region
  source 1..24: mol_type = other DNA
atgatttggtcaagccttgtggta

SEQ ID NO: 4334 - DNA, 27 bp, synthetic construct
  misc_feature 1..27: note = Synthetic polynucleotide encoding artificial human antibody CDR-L3 region
  source 1..27: mol_type = other DNA
atgcaagctctacaaactccgtggacg

SEQ ID NO: 4335 - DNA, 27 bp, synthetic construct
  misc_feature 1..27: note = Synthetic polynucleotide encoding artificial human antibody CDR-L3 region
  source 1..27: mol_type = other DNA
ctacaaaattacaattacccttggacg

SEQ ID NO: 4336 - DNA, 27 bp, synthetic construct
  misc_feature 1..27: note = Synthetic polynucleotide encoding artificial human antibody CDR-L3 region
  source 1..27: mol_type = other DNA
atgcaaggtatacaccttcctaggact

SEQ ID NO: 4337 - protein, 263 aa, Homo sapiens
MRLGLCVVALVLSWTHLTISSRGIKGKRQRRISAEGSQACAKGCELCSEVNGCLKCSPKLFILLERNDIRQVGVCLPSCPPGYFDARNPDMNKCIKCKIEHCEACFSHNFCTKCKEGLYLHKGRCYPACPEGSSAANGTMECSSPAQCEMSEWSPWGPCSKKQQLCGFRRGSEERTRRVLHAPVGDHAACSDTKETRRCTVRRVPCPEGQKRRKGGQGRRENANRNLARKESKEAGAGSRRRKGQQQQQQQGTVGPLTSAGPA

SEQ ID NO: 4338 - protein, 485 aa, Homo sapiens
MYKMNICNKPSNKTAPEKSVWTAPAQPSGPSPELQGQRSRRNGWSWPPHPLQIVAWLLYLFFAVIGFGILVPLLPHHWVPAGYACMGAIFAGHLVVHLTAVSIDPADANVRDKSYAGPLPIFNRSQHAHVIEDLHCNLCNVDVSARSKHCSACNKCVCGFDHHCKWLNNCVGERNYRLFLHSVASALLGVLLLVLVATYVFVEFFVNPMRLRTNRHFEVLKNHTDVWFVFLPAAPVETQAPAILALAALLILLGLLSTALLGHLLCFHIYLMWHKLTTYEYIVQHRPPQEAKGVHRELESCPPKMRPIQEMEFYMRTFRHMRPEPPGQAGPAAVNAKHSRPASPDPTPGRRDCAGPPVQVEWDRKKPLPWRSPLLLLAMWGPQAPPCLCRKRGRGACIKCERLRPRIRRRGLGPPAAAPARRRIPRTPALCTPLALPAPTTRRRQSPWTRFQWRRRAWAAPLWPPRGAGADSPRWRGRRVRPPFS

SEQ ID NO: 4339 - protein, 462 aa, Homo sapiens
MDTKHFLPLDFSTQVNSSLTSPTGRGSMAAPSLHPSLGPGIGSPGQLHSPISTLSSPINGMGPPFSVISSPMGPHSMSVPTTPTLGFSTGSPQLSSPMNPVSSSEDIKPPLGLNGVLKVPAHPSGNMASFTKHICAICGDRSSGKHYGVYSCEGCKGFFKRTVRKDLTYTCRDNKDCLIDKRQRNRCQYCRYQKCLAMGMKREAVQEERQRGKDRNENEVESTSSANEDMPVERILEAELAVEPKTETYVEANMGLNPSSPNDPVTNICQAADKQLFTLVEWAKRIPHFSELPLDDQVILLRAGWNELLIASFSHRSIAVKDGILLATGLHVHRNSAHSAGVGAIFDRVLTELVSKMRDMQMDKTELGCLRAIVLFNPDSKGLSNPAEVEALREKVYASLEAYCKHKYPEQPGRFAKLLLRLPALRSIGLKCLEHLFFFKLIGDTPIDTFLMEMLEAPHQMT

SEQ ID NO: 4340 - protein, 463 aa, Homo sapiens
MYGNYSHFMKFPAGYGGSPGHTGSTSMSPSAALSTGKPMDSHPSYTDTPVSAPRTLSAVGTPLNALGSPYRVITSAMGPPSGALAAPPGINLVAPPSSQLNVVNSVSSSEDIKPLPGLPGIGNMNYPSTSPGSLVKHICAICGDRSSGKHYGVYSCEGCKGFFKRTIRKDLIYTCRDNKDCLIDKRQRNRCQYCRYQKCLVMGMKREAVQEERQRSRERAESEAECATSGHEDMPVERILEAELAVEPKTESYGDMNMENSTNDPVTNICHAADKQLFTLVEWAKRIPHFSDLTLEDQVILLRAGWNELLIASFSHRSVSVQDGILLATGLHVHRSSAHSAGVGSIFDRVLTELVSKMKDMQMDKSELGCLRAIVLFNPDAKGLSNPSEVETLREKVYATLEAYTKQKYPEQPGRFAKLLLRLPALRSIGLKCLEHLFFFKLIGDTPIDTFLMEMLETPLQIT

SEQ ID NO: 4341 - protein, 183 aa, Homo sapiens
MQAPRAALVFALVIALVPVGRGNYEELENSGDTTVESERPNKVTIPSTFAAVTIKETLNANINSTNFAPDENQLEFILMVLIPLILLVLLLLFVVFLATYYKRKRTKQEPSSQGSQSALQTYELGSENVKVPIFEEDTPSVMEIEMEELDKWMNSMNRNADFECLPTLKEEKESNHNPSDSES

SEQ ID NO: 4342 - protein, 136 aa, Homo sapiens
MAGAGSAAVSGAGTPVAGPTGRDLFAEGLLEFLRPAVQQLDSHVHAVRESQVELREQIDNLATELCRINEDQKVALDLDPYVKKLLNARRRVVLVNNILQNAQERLRRLNHSVAKETARRRAMLDSGIYPPGSPGK

SEQ ID NO: 4343 - protein, 847 aa, Homo sapiens
MAKPLTDQEKRRQISIRGIVGVENVAELKKSFNRHLHFTLVKDRNVATTRDYYFALAHTVRDHLVGRWIRTQQHYYDKCPKRVYYLSLEFYMGRTLQNTMINLGLQNACDEAIYQLGLDIEELEEIEEDAGLGNGGLGRLAACFLDSMATLGLAAYGYGIRYEYGIFNQKIRDGWQVEEADDWLRYGNPWEKSRPEFMLPVHFYGKVEHTNTGTKWIDTQVVLALPYDTPVPGYMNNTVNTMRLWSARAPNDFNLRDFNVGDYIQAVLDRNLAENISRVLYPNDNFFEGKELRLKQEYFVVAATLQDIIRRFKASKFGSTRGAGTVFDAFPDQVAIQLNDTHPALAIPELMRIFVDIEKLPWSKAWELTQKTFAYTNHTVLPEALERWPVDLVEKLLPRHLEIIYEINQKHLDRIVALFPKDVDRLRRMSLIEEEGSKRINMAHLCIVGSHAVNGVAKIHSDIVKTKVFKDFSELEPDKFQNKTNGITPRRWLLLCNPGLAELIAEKIGEDYVKDLSQLTKLHSFLGDDVFLRELAKVKQENKLKFSQFLETEYKVKINPSSMFDVQVKRIHEYKRQLLNCLHVITMYNRIKKDPKKLFVPRTVIIGGKAAPGYHMAKMIIKLITSVADVVNNDPMVGSKLKVIFLENYRVSLAEKVIPATDLSEQISTAGTEASGTGNMKFMLNGALTIGTMDGANVEMAEEAGEENLFIFGMRIDDVAALDKKGYEAKEYYEALPELKLVIDQIDNGFFSPKQPDLFKDIINMLFYHDRFKVFADYEAYVKCQDKVSQLYMNPKAWNTMVLKNIAASGKFSSDRTIKEYAQNIWNVEPSDLKISLSNESNKVNGN

SEQ ID NO: 4344 - protein, 328 aa, Homo sapiens
MMWRPSVLLLLLLLRHGAQGKPSPDAGPHGQGRVHQAAPLSDAPHDDAHGNFQYDHEAFLGREVAKEFDQLTPEESQARLGRIVDRMDRAGDGDGWVSLAELRAWIAHTQQRHIRDSVSAAWDTYDTDRDGRVGWEELRNATYGHYAPGEEFHDVEDAETYKKMLARDERRFRVADQDGDSMATREELTAFLHPEEFPHMRDIVIAETLEDLDRNKDGYVQVEEYIADLYSAEPGEEEPAWVQTERQQFRDFRDLNKDGHLDGSEVGHWVLPPAQDQPLVEANHLLHESDTDKDGRLSKAEILGNWNMFVGSQATNYGEDLTRHHDEL

SEQ ID NO: 4345 - protein, 421 aa, Homo sapiens
MAVDVAEYHLSVIKSPPGWEVGVYAAGALALLGIAAVSLWKLWTSGSFPSPSPFPNYDYRYLQQKYGESCAEAREKRVPAWNAQRASTRGPPSRKGSLSIEDTFESISELGPLELMGRELDLAPYGTLRKSQSADSLNSISSVSNTFGQDFTLGQVEVSMEYDTASHTLNVAVMQGKDLLEREEASFESCFMRVSLLPDEQIVGISRIQRNAYSIFFDEKFSIPLDPTALEEKSLRFSVFGIDEDERNVSTGVVELKLSVLDLPLQPFSGWLYLQDQNKAADAVGEILLSLSYLPTAERLTVVVVKAKNLIWTNDKTTADPFVKVYLLQDGRKMSKKKTAVKRDDPNPVFNEAMIFSVPAIVLQDLSLRVTVAESSSDGRGDNVGHVIIGPSASGMGTTHWNQMLATLRRPVSMWHAVRRN

SEQ ID NO: 4346 - protein, 390 aa, Homo sapiens
MAMVTGGWGDPGGDTNGVDKAGGSYPRATEDDSASPPGATSDAEPGDEERPGLQVDCVVCGDKSSGKHYGVFTCEGCKSFFKRSIRRNLSYTCRSNRDCQIDQHHRNQCQYCRLKKCFRVGMRKEAVQRGRIPHALPGPAACSPPGATGVEPFTGPPVSELIAQLLRAEPYPAAGRFGGGGAVLGIDNVCELAARLLFSTVEWARHAPFFPELPAADQVALLRLSWSELFVLNAAQAALPLHTAPLLAAAGLHAAPMAAERAVAFMDQVRAFQEQVDKLGRLQVDAAEYGCLKAIALFTPDACGLSDPAHVESLQEKAQVALTEYVRAQYPSQPQRFGRLLLRLPALRAVPASLISQLFFMRLVGKTPIETLIRDMLLSGSTFNWPYGSG

SEQ ID NO: 4347 - protein, 828 aa, Homo sapiens
MDSEAFQSARDFLDMNFQSLAMKHMDLKQMELDTAAAKVDELTKQLESLWSDSPAPPGPQAGPPSRPPRYSSSSIPEPFGSRGSPRKAATDGADTPFGRSESAPTLHPYSPLSPKGRPSSPRTPLYLQPDAYGSLDRATSPRPRAFDGAGSSLGRAPSPRPGPGPLRQQGPPTPFDFLGRAGSPRGSPLAEGPQAFFSERGPSPRPPATAYDAPASAFGSSLLGSGGSAFAPPLRAQDDLTLRRRPPKAWNESDLDVAYEKKPSQTASYERLDVFARPASPSLQLLPWRESSLDGLGGTGKDNLTSATLPRNYKVSPLASDRRSDAGSYRRSLGSAGPSGTLPRSWQPVSRIPMPPSSPQPRGAPRQRPIPLSMIFKLQNAFWEHGASRAMLPGSPLFTRAPPPKLQPQPQPQPQPQSQPQPQLPPQPQTQPQTPTPAPQHPQQTWPPVNEGPPKPPTELEPEPEIEGLLTPVLEAGDVDEGPVARPLSPTRLQPALPPEAQSVPELEEVARVLAEIPRPLKRRGSMEQAPAVALPPTHKKQYQQIISRLFHRHGGPGPGGPEPELSPITEGSEARAGPPAPAPPAPIPPPAPSQSSPPEQPQSMEMRSVLRKAGSPRKARRARLNPLVLLLDAALTGELEVVQQAVKEMNDPSQPNEEGITALHNAICGANYSIVDFLITAGANVNSPDSHGWTPLHCAASCNDTVICMALVQHGAAIFATTLSDGATAFEKCDPYREGYADCATYLADVEQSMGLMNSGAVYALWDYSAEFGDELSFREGESVTVLRRDGPEETDWWWAALHGQEGYVPRNYFGLFPRVKPQRSKV

SEQ ID NO: 4348 - protein, 317 aa, Homo sapiens
MQPYTKNWTQVTEFVMMGFAGIHEAHLLFFILFLTMYLFTLVENLAIILVVGLDHRLRRPMYFFLTHLSCLEIWYTSVTVPKMLAGFIGVDGGKNISYADCLSQLFIFTFLGATECFLLAAMAYDRYVAICMPLHYGAFVSWGTCIRLAAACWLVGFLTPILPIYLLSQLTFYGPNVIDHFSCDASPLLALSCSDVTWKETVDFLVSLAVLLASSMVIAVSYGNIVWTLLHIRSAAERWKAFSTCAAHLTVVSLFYGTLFFMYVQTKVTSSINFNKVVSVFYSVVTPMLNPLIYSLRNKEVKGALGRVFSLNFWKGQ

SEQ ID NO: 4349 - protein, 180 aa, Homo sapiens
MQAEGRGTGGSTGDADGPGGPGIPDGPGGNAGGPGEAGATGGRGPRGAGAARASGPGGGAPRGPHGGAASGLNGCCRCGARGPESRLLEFYLAMPFATPMEAELARRSLAQDAPPLPVPGVLLKEFTVSGNILTIRLTAADHRQLQLSISSCLQQLSLLMWITQCFLPVFLAQPPSGQRR

SEQ ID NO: 4350 - protein, 365 aa, Homo sapiens
MNITNCTTEASMAIRPKTITEKMLICMTLVVITTLTTLLNLAVIMAIGTTKKLHQPANYLICSLAVTDLLVAVLVMPLSIIYIVMDRWKLGYFLCEVWLSVDMTCCTCSILHLCVIALDRYWAITNAIEYARKRTAKRAALMILTVWTISIFISMPPLFWRSHRRLSPPPSQCTIQHDHVIYTIYSTLGAFYIPLTLILILYYRIYHAAKSLYQKRGSSRHLSNRSTDSQNSFASCKLTQTFCVSDFSTSDPTTEFEKFHASIRIPPFDNDLDHPGERQQISSTRERKAARILGLILGAFILSWLPFFIKELIVGLSIYTVSSEVADFLTWLGYVNSLINPLLYTSFNEDFKLAFKKLIRCREHT

SEQ ID NO: 4351 - protein, 362 aa, Homo sapiens
MKLHCCLFTLVASIIVPAAFVLEDVDFDQMVSLEANRSSYNASFPSSFELSASSHSDDDVIIAKEGTSVSIECLLTASHYEDVHWHNSKGQQLDGRSRGGKWLVSDNFLNITNVAFDDRGLYTCFVTSPIRASYSVTLRVIFTSGDMSVYYMIVCLIAFTITLILNVTRLCMMSSHLRKTEKAINEFFRTEGAEKLQKAFEIAKRIPIITSAKTLELAKVTQFKTMEFARYIEELARSVPLPPLILNCRAFVEEMFEAVRVDDPDDLGERIKERPALNAQGGIYVINPEMGRSNSPGGDSDDGSLNEQGQEIAVQVSVHLQSETKSIDTESQGSSHFSPPDDIGSAESNCNYKDGAYENCQL

SEQ ID NO: 4352 - protein, 308 aa, Homo sapiens
MKGALGSPVAAAGAAMQESFGCVVANRFHQLLDDESDPFDILREAERRRQQQLQRKRRDEAAAAAGAGPRGGRSPAGASGHRAGAGGRRESQKERKSLPAPVAQRPDSPGGGLQAPGQKRTPRRGEQQGWNDSRGPEGMLERAERRSYREYRPYETERQADFTAEKFPDEKVPELEVEEETQVQEMTLDEWKNLQEQTRPKPEFNIRKPESTVPSKAVVIHKSKYRDDMVKDDYEDDSHVFRKPANDITSQLEINFGNLPRPGRGARGGTRGGRGRIRRAENYGPRAEVVMQDVAPNPDDPEDFPALS

SEQ ID NO: 4353 - protein, 141 aa, Homo sapiens
MDIPVPSSFNDVGQDWRLRHFVDQMWYEREVTFLEQWTQDLHTRVVLRIVSAHSYAIVWVNGVDALEHEGSTSPLTPTSVACSRWGPCPPASASLSPSATCSSPPPCHQGASSTWPTPPRGYHPASTADTHLRVPPRGALH

SEQ ID NO: 4354 - protein, 340 aa, Homo sapiens
MLEAPGPSDGCELSNPSASRVSCAGQMLEVQPGLYFGGAAAVAEPDHLREAGITAVLTVDSEEPSFKAGPGVEDLWRLFVPALDKPETDLLSHLDRCVAFIGQARAEGRAVLVHCHAGVSRSVAIITAFLMKTDQLPFEKAYEKLQILKPEAKMNEGFEWQLKLYQAMGYEVDTSSAIYKQYRLQKVTEKYPELQNLPQELFAVDPTTVSQGLKDEVLYKCRKCRRSLFRSSSILDHREGSGPIAFAHKRMTPSSMLTTGRQAQCTSYFIEPVQWMESALLGVMDGQLLCPKCSAKLGSFNWYGEQCSCGRWITPAFQIHKNRVDEMKILPVLGSQTGKI

SEQ ID NO: 4355 - protein, 892 aa, Homo sapiens
MDHYDSQQTNDYMQPEEDWDRDLLLDPAWEKQQRKTFTAWCNSHLRKAGTQIENIEEDFRDGLKLMLLLEVISGERLAKPERGKMRVHKISNVNKALDFIASKGVKLVSIGAEEIVDGNVKMTLGMIWTIILRFAIQDISVEETSAKEGLLLWCQRKTAPYKNVNIQNFHISWKDGLGFCALIHRHRPELIDYGKLRKDDPLTNLNTAFDVAEKYLDIPKMLDAEDIVGTARPDEKAIMTYVSSFYHAFSGAQKAETAANRICKVLAVNQENEQLMEDYEKLASDLLEWIRRTIPWLENRVPENTMHAMQQKLEDFRDYRRLHKPPKVQEKCQLEINFNTLQTKLRLSNRPAFMPSEGRMVSDINNAWGCLEQVEKGYEEWLLNEIRRLERLDHLAEKFRQKASIHEAWTDGKEAMLRQKDYETATLSEIKALLKKHEAFESDLAAHQDRVEQIAAIAQELNELDYYDSPSVNARCQKICDQWDNLGALTQKRREALERTEKLLETIDQLYLEYAKRAAPFNNWMEGAMEDLQDTFIVHTIEEIQGLTTAHEQFKATLPDADKERLAILGIHNEVSKIVQTYHVNMAGTNPYTTITPQEINGKWDHVRQLVPRRDQALTEEHARQQHNERLRKQFGAQANVIGPWIQTKMEEIGRISIEMHGTLEDQLSHLRQYEKSIVNYKPKIDQLEGDHQLIQEALIFDNKHTNYTMEHIRVGWEQLLTTIARTINEVENQILTRDAKGISQEQMNEFRASFNHFDRDHSGTLGPEEFKACLISLGYDIGNDPQGEAEFARIMSIVDPNRLGVVTFQAFIDFMSRETADTDTADQVMASFKILAGDKNYITMDELRRELPPDQAEYCIARMAPYTGPDSVPGALDYMSFSTALYGESDL

SEQ ID NO: 4356 - protein, 545 aa, Homo sapiens
MAREPRKNAALDAQSAEDQTGLLTVKVEKEEASALTAEVRAPCSPARGPERSRQRFRGFRYPEAAGPREALSRLRELCGQWLQPEMHSKEQILELLVLEQFLTILPGNLQSWVREQHPESGEEVVVLLEYLERQLDEPAPQVPVGDQGQELLCCKMALLTQTQGSQSSQCQPMKALFKHESLGSQPLHDRVLQVPGLAQGGCCREDAMVASRLTPGSQGLLKMEDVALTLTPGWTQLDSSQVNLYRDEKQENHSSLVSLGGEIQTKSRDLPPVKKLPEKEHGKICHLREDIAQIPTHAEAGEQEGRLQRKQKNAIGSRRHYCHECGKSFAQSSGLTKHRRIHTGEKPYECEDCGKTFIGSSALVIHQRVHTGEKPYECEECGKVFSHSSNLIKHQRTHTGEKPYECDDCGKTFSQSCSLLEHHKIHTGEKPYQCNMCGKAFRRNSHLLRHQRIHGDKNVQNPEHGESWESQGRTESQWENTEAPVSYKCNECERSFTRNRSLIEHQKIHTGEKPYQCDTCGKGFTRTSYLVQHQRSHVGKKTLSQ

SEQ ID NO: 4357 - protein, 448 aa, Homo sapiens
MALTLLEDWCKGMDMDPRKALLIVGIPMECSEVEIQDTVKAGLQPLCAYRVLGRMFRREDNAKAVFIELADTVNYTTLPSHIPGKGGSWEVVVKPRNPDDEFLSRLNYFLKDEGRSMTDVARALGCCSLPAESLDAEVMPQVRSPPLEPPKESMWYRKLKVFSGTASPSPGEETFEDWLEQVTEIMPIWQVSEVEKRRRLLESLRGPALSIMRVLQANNDSITVEQCLDALKQIFGDKEDFGASQFRFLQTSPKIGEKVSTFLLRLEPLLQKAVHKSPLSVRSTDMIRLKHLLARVAMTPALRGKLELLDQRGCPPNFLELMKLIRDEEEWENTEAVMKNKEKPSGRGRGASGRQARAEASVSAPQATVQARSFSDSSPQTIQGGLPPLVKRRRLLGSESTRGEDHGQATYPKAENQTPGREGPQAAGEELGNEAGAGAMSHPKPWET

SEQ ID NO: 4358 - protein, 621 aa, Homo sapiens [sequence omitted]

SEQ ID NO: 4359 - protein, 552 aa, Homo sapiens
MPVAATNSETAMQQVLDNLGSLPSATGAAELDLIFLRGIMESPIVRSLAKAHERLEETKLEAVRDNNLELVQEILRDLAQLAEQSSTAAELAHILQEPHFQSLLETHDSVASKTYETPPPSPGLDPTFSNQPVPPDAVRMVGIRKTAGEHLGVTFRVEGGELVIARILHGGMVAQQGLLHVGDIIKEVNGQPVGSDPRALQELLRNASGSVILKILPSYQEPHLPRQVFVKCHFDYDPARDSLIPCKEAGLRFNAGDLLQIVNQDDANWWQACHVEGGSAGLIPSQLLEEKRKAFVKRDLELTPNSGTLCGSLSGKKKKRMMYLTTKNAEFDRHELLIYEEVARMPPFRRKTLVLIGAQGVGRRSLKNKLIMWDPDRYGTTVPYTSRRPKDSEREGQGYSFVSRGEMEADVRAGRYLEHGEYEGNLYGTRIDSIRGVVAAGKVCVLDVNPQAVKVLRTAEFVPYVVFIEAPDFETLRAMNRAALESGISTKQLTEADLRRTVEESSRIQRGYGHYFDLCLVNSNLERTFRELQTAMEKLRTEPQWVPVSWVY

SEQ ID NO: 4360 - protein, 526 aa, Homo sapiens
MAVFPSSGLPRCLLTLILLQLPKLDSAPFDVIGPPEPILAVVGEDAELPCRLSPNASAEHLELRWFRKKVSPAVLVHRDGREQEAEQMPEYRGRATLVQDGIAKGRVALRIRGVRVSDDGEYTCFFREDGSYEEALVHLKVAALGSDPHISMQVQENGEICLECTSVGWYPEPQVQWRTSKGEKFPSTSESRNPDEEGLFTVAASVIIRDTSAKNVSCYIQNLLLGQEKKVEISIPASSLPRLTPWIVAVAVILMVLGLLTIGSIFFTWRLYNERPRERRNEFSSKERLLEELKWKKATLHAVDVTLDPDTAHPHLFLYEDSKSVRLEDSRQKLPEKTERFDSWPCVLGRETFTSGRHYWEVEVGDRTDWAIGVCRENVMKKGFDPMTPENGFWAVELYGNGYWALTPLRTPLPLAGPPRRVGIFLDYESGDISFYNMNDGSDIYTFSNVTFSGPLRPFFCLWSSGKKPLTICPIADGPERVTVIANAQDLSKEIPLSPMGEDSAPRDADTLHSKLIPTQPSQGAP

SEQ ID NO: 4361 - protein, 241 aa, Homo sapiens
MASLSGLASALESYRGRDRLIRVLGYCCQLVGGVLVEQCPARSEVGTRLLVVSTQLSHCRTILRLFDDLAMFVYTKQYGLGAQEEDAFVRCVSVLGNLADQLYYPCEHVAWAADARVLHVDSSRWWTLSTTLWALSLLLGVARSLWMLLKLRQRLRSPTAPFTSPLPRGKRRAMEAQMQSEALSLLSNLADLANAVHWLPRGVLWAGRFPPWLVGLMGTISSILSMYQAARAGGQAEATTP

SEQ ID NO: 4362 - protein, 575 aa, Homo sapiens
MDPEDEGVAGVMSVGPPAARLQEPVTFRDVAVDFTQEEWGQLDPTQRILYRDVMLETFGHLLSIGPELPKPEVISQLEQGTELWVAERGTTQGCHPAWEPRSESQASRKEEGLPEEEPSHVTGREGFPTDAPYPTTLGKDRECQSQSLALKEQNNLKQLEFGLKEAPVQDQGYKTLRLRENCVLSSSPNPFPEISRGEYLYTYDSQITDSEHNSSLVSQQTGSPGKQPGENSDCHRDSSQAIPITELTKSQVQDKPYKCTDCGKSFNHNAHLTVHKRIHTGERPYMCKECGKAFSQNSSLVQHERIHTGDKPYKCAECGKSFCHSTHLTVHRRIHTGEKPYECQDCGRAFNQNSSLGRHKRTHTGEKPYTCSVCGKSFSRTTCLFLHLRTHTEERPYECNHCGKGFRHSSSLAQHQRKHAGEKPFECRQRLIFEQTPALTKHEWTEALGCDPPLSQDERTHRSDRPFKCNQCGKCFIQSSHLIRHQITHTREEQPHGRSRRREQSSSRNSHLVQHQHPNSRKSSAGGAKAGQPESRALALFDIQKIMQEKNPVHVIGVEEPSVGASMLFDIREST

SEQ ID NO: 4363 - protein, 733 aa, Homo sapiens
MERRSESPCLRDSPDRRSGSPDVKGPPPVKVARLEQNGSPMGARGRPNGAVAKAVGGLMIPVFCVVEQLDGSLEYDNREEHAEFVLVRKDVLFSQLVETALLALGYSHSSAAQAQGIIKLGRWNPLPLSYVTDAPDATVADMLQDVYHVVTLKIQLQSCSKLEDLPAEQWNHATVRNALKELLKEMNQSTLAKECPLSQSMISSIVNSTYYANVSATKCQEFGRWYKKYKKIKVERVERENLSDYCVLGQRPMHLPNMNQLASLGKTNEQSPHSQIHHSTPIRNQVPALQPIMSPGLLSPQLSPQLVRQQIAMAHLINQQIAVSRLLAHQHPQAINQQFLNHPPIPRAVKPEPTNSSVEVSPDIYQQVRDELKRASVSQAVFARVAFNRTQGLLSEILRKEEDPRTASQSLLVNLRAMQNFLNLPEVERDRIYQDERERSMNPNVSMVSSASSSPSSSRTPQAKTSTPTTDLPIKVDGANINITAAIYDEIQQEMKRAKVSQALFAKVAANKSQGWLCELLRWKENPSPENRTLWENLCTIRRFLNLPQHERDVIYEEESRHHHSERMQHVVQLPPEPVQVLHRQQSQPAKESSPPREEAPPPPPPTEDSCAKKPRSRTKISLEALGILQSFIHDVGLYPDQEAIHTLSAQLDLPKHTIIKFFQNQRYHVKHHGKLKEHLGSAVDVAEYKDEELLTESEENDSEEGSEEMYKVEAEEENADKSKAAPAEIDQR

SEQ ID NO: 4364 - protein, 290 aa, Homo sapiens
MRLNSTGEVPVLIHGENIICEATQIIDYLEQTFLDERTPRLMPDKESMYYPRVQHYRELLDSLPMDAYTHGCILHPELTVDSMIPAYATTRIRSQIGNTESELKKLAEENPDLQEAYIAKQKRLKSKLLDHDNVKYLKKILDELEKVLDQVETELQRRNEETPEEGQQPWLCGESFTLADVSLAVTLHRLKFLGFARRNWGNGKRPNLETYYERVLKRKTFNKVLGHVNNILISAVLPTAFRVAKKRAPKVLGTTLVVGLLAGVGYFAFMLFRKRLGSMILAFRPRPNYF

SEQ ID NO: 4365 - protein, 734 aa, Homo sapiens
MAASPGPAGVGGAGAVYGSGSSGFALDSGLEIKTRSVEQTLLPLVSQITTLINHKDNTKKSDKTLQAIQRVGQAVNLAVGRFVKVGEAIANENWDLKEEINIACIEAKQAGETIAALTDITNLNHLESDGQITIFTDKTGVIKAARLLLSSVTKVLLLADRVVIKQIITSRNKVLATMERLEKVNSFQEFVQIFSQFGNEMVEFAHLSGDRQNDLKDEKKKAKMAAARAVLEKCTMMLLTASKTCLRHPNCESAHKNKEGVFDRMKVALDKVIEIVTDCKPNGETDISSISIFTGIKEFKMNIEALRENLYFQSKENLSVTLEVILERMEDFTDSAYTSHEHRERILELSTQARMELQQLISVWIQAQSKKTKSIAEELELSILKISHSLNELKKELHSTATQLAADLLKYHADHVVLKALKLTGVEGNLEALAEYACKLSEQKEQLVETCRLLRHISGTEPLEITCIHAEETFQVTGQQIISAAETLTLHPSSKIAKENLDVFCEAWESQISDMSTLLREINDVFEGRRGEKYGYLSLPKPMKNNANLKSLKPDKPDSEEQAKIAKLGLKLGLLTSDADCEIEKWEDQENEIVQYGRNMSSMAYSLYLFTRGEGPLKTSQDLIHQLEVFAAEGLKLTSSVQAFSKQLKDDDKLMLLLEINKLIPLCHQLQTVTKTSLQNKVFLKVDKCITKTRSMMALLVQLLSLCYKLLKKLQMENNGWVSVTNKDTMDSKT

SEQ ID NO: 4366 - protein, 622 aa, Homo sapiens
MSRQTTSVGSSCLDLWREKNDRLVRQAKVAQNSGLTLRRQQLAQDALEGLRGLLHSLQGLPAAVPVLPLELTVTCNFIILRASLAQGFTEDQAQDIQRSLERVLETQEQQGPRLEQGLRELWDSVLRASCLLPELLSALHRLVGLQAALWLSADRLGDLALLLETLNGSQSGASKDLLLLLKTWSPPAEELDAPLTLQDAQGLKDVLLTAFAYRQGLQELITGNPDKALSSLHEAASGLCPRPVLVQVYTALGSCHRKMGNPQRALLYLVAALKEGSAWGPPLLEASRLYQQLGDTTAELESLELLVEALNVPCSSKAPQFLIEVELLLPPPDLASPLHCGTQSQTKHILASRCLQTGRAGDAAEHYLDLLALLLDSSEPRFSPPPSPPGPCMPEVFLEAAVALIQAGRAQDALTLCEELLSRTSSLLPKMSRLWEDARKGTKELPYCPLWVSATHLLQGQAWVQLGAQKVAISEFSRCLELLFRATPEEKEQGAAFNCEQGCKSDAALQQLRAAALISRGLEWVASGQDTKALQDFLLSVQMCPGNRDTYFHLLQTLKRLDRRDEATALWWRLEAQTKGSHEDALWSLPLYLESYLSWIRPSDRDAFLEEFRTSLPKSCDL

SEQ ID NO: 4367 - protein, 670 aa, Homo sapiens [sequence omitted]

SEQ ID NO: 4368 - protein, 288 aa, Homo sapiens
MKDRTQELRTAKDSDDDDDVAVTVDRDRFMDEFFEQVEEIRGFIDKIAENVEEVKRKHSAILASPNPDEKTKEELEELMSDIKKTANKVRSKLKSIEQSIEQEEGLNRSSADLRIRKTQHSTLSRKFVEVMSEYNATQSDYRERCKGRIQRQLEITGRTTTSEELEDMLESGNPAIFASGIIMDSSISKQALSEIETRHSEIIKLENSIRELHDMFMDMAMLVESQGEMIDRIEYNVEHAVDYVERAVSDTKKAVKYQSKARRKKIMIIICCVILGIVIASTVGGIFA

SEQ ID NO: 4369 - protein, 209 aa, Homo sapiens
MNPSMKQKQEEIKENIKNSSVPRRTLKMIQPSASGSLVGRENELSAGLSKRKHRNDHLTSTTSSPGVIVPESSENKNLGGVTQESFDLMIKENPSSQYWKEVAEKRRKALYEALKENEKLHKEIEQKDNEIARLKKENKELAEVAEHVQYMAELIERLNGEPLDNFESLDNQEFDSEEETVEDSLVEDSEIGTCAEGTVSSSTDAKPCI

SEQ ID NO: 4370 - protein, 561 aa, Homo sapiens
MAESGESGGPPGSQDSAAGAEGAGAPAAAASAEPKIMKVTVKTPKEKEEFAVPENSSVQQFKEEISKRFKSHTDQLVLIFAGKILKDQDTLSQHGIHDGLTVHLVIKTQNRPQDHSAQQTNTAGSNVTTSSTPNSNSTSGSATSNPFGLGGLGGLAGLSSLGLNTTNFSELQSQMQRQLLSNPEMMVQIMENPFVQSMLSNPDLMRQLIMANPQMQQLIQRNPEISHMLNNPDIMRQTLELARNPAMMQEMMRNQDRALSNLESIPGGYNALRRMYTDIQEPMLSAAQEQFGGNPFASLVSNTSSGEGSQPSRTENRDPLPNPWAPQTSQSSSASSGTASTVGGTTGSTASGTSGQSTTAPNLVPGVGASMFNTPGMQSLLQQITENPQLMQNMLSAPYMRSMMQSLSQNPDLAAQMQNPDTLSAMSNPRAMQALLQIQQGLQTLATEAPGLIPGFTPGLGALGSTGGSSGTNGSNATPSENTSPTAGTTEPGHQQFIQQMLQALAGVNPQLQNPEVRFQQQLEQLSAMGFLNREANLQALIATGGDINAAIERLLGSQPS

SEQ ID NO: 4371 - protein, 475 aa, Homo sapiens
MAALTTLFKYIDENQDRYIKKLAKWVAIQSVSAWPEKRGEIRRMMEVAAADVKQLGGSVELVDIGKQKLPDGSEIPLPPILLGRLGSDPQKKTVCIYGHLDVQPAALEDGWDSEPFTLVERDGKLYGRGSTDDKGPVAGWINALEAYQKTGQEIPVNVRFCLEGMEESGSEGLDELIFARKDTFFKDVDYVCISDNYWLGKKKPCITYGLRGICYFFIEVECSNKDLHSGVYGGSVHEAMTDLILLMGSLVDKRGNILIPGINEAVAAVTEEEHKLYDDIDFDIEEFAKDVGAQILLHSHKKDILMHRWRYPSLSLHGIEGAFSGSGAKTVIPRKVVGKFSIRLVPNMTPEVVGEQVTSYLTKKFAELRSPNEFKVYMGHGGKPWVSDFSHPHYLAGRRAMKTVFGVEPDLTREGGSIPVTLTFQEATGKNVMLLPVGSADDGAHSQNEKLNRYNYIEGTKMLAAYLYEVSQLKD

SEQ ID NO: 4372 - protein, 497 aa, Homo sapiens
MTFNSFEGSKTCVPADINKEEEFVEEFNRLKTFANFPSGSPVSASTLARAGFLYTGEGDTVRCFSCHAAVDRWQYGDSAVGRHRKVSPNCRFINGFYLENSATQSTNSGIQNGQYKVENYLGSRDHFALDRPSETHADYLLRTGQVVDISDTIYPRNPAMYSEEARLKSFQNWPDYAHLTPRELASAGLYYTGIGDQVQCFCCGGKLKNWEPCDRAWSEHRRHFPNCFFVLGRNLNIRSESDAVSSDRNFPNSTNLPRNPSMADYEARIFTFGTWIYSVNKEQLARAGFYALGEGDKVKCFHCGGGLTDWKPSEDPWEQHAKWYPGCKYLLEQKGQEYINNIHLTHSLEECLVRTTEKTPSLTRRIDDTIFQNPMVQEAIRMGFSFKDIKKIMEEKIQISGSNYKSLEVLVADLVNAQKDSMQDESSQTSLQKEISTEEQLRRLQEEKLCKICMDRNIAIVFVPCGHLVTCKQCAEAVDKCPMCYTVITFKQKIFMS

SEQ ID NO: 4373 - protein, 354 aa, Homo sapiens
MCYVPSPVLASVGDTDDRFEDLEEANPFSFREFLKTKNLGLSKEDPASRIYAKEASRHSLGLDHNSPPSQTGGYGLEYQQPFFEDPTGAGDLLDGEEDEDTGWSGAYLPSAIEQTHPERVPAGTSPCSTYLSFFSTPSELAGPESLPSWALSDTDSRVSPASPAGSPSADFAVHGESLGDRHLRTLQISYDALKDENSKLRRKLNEVQSFSEAQTEMVRTLERKLEAKMIKEESDYHDLESVVQQVEQNLELMTKRAVKAENHVVKLKQEISLLQAQVSNFQRENEALRCGQGASLTVVKQNADVALQNLRVVMNSAQASIKQLVSGAETLNLVAEILKSIDRISEIKDEEEDS

SEQ ID NO: 4374 - protein, 224 aa, Homo sapiens
MSVFGKLFGAGGGKAGKGGPTPQEAIQRLRDTEEMLSKKQEFLEKKIEQELTAAKKHGTKNKRAALQALKRKKRYEKQLAQIDGTLSTIEFQREALENANTNTEVLKNMGYAAKAMKAAHDNMDIDKVDELMQDIADQQELAEEISTAISKPVGFGEEFDEDELMAELEELEQEELDKNLLEISGPETVPLPNVPSIALPSKPAKKKEEEDDDMKELENWAGSM

SEQ ID NO: 4375 - protein, 470 aa, Homo sapiens
MSVTDQAFVTLATNDIYCQGALVLGQSLRRHRLTRKLVVLITPQVSSLLRVILSKVFDEVIEVNLIDSADYIHLAFLKRPELGLTLTKLHCWTLTHYSKCVFLDADTLVLSNVDELFDRGEFSAAPDPGWPDCFNSGVFVFQPSLHTHKLLLQHAMEHGSFDGADQGLLNSFFRNWSTTDIHKHLPFIYNLSSNTMYTYSPAFKQFGSSAKVVHFLGSMKPWNYKYNPQSGSVLEQGSVSSSQHQAAFLHLWWTVYQNNVLPLYKSVQAGEARASPGHTLCRSDVGGPCADSASGVGEPCENSTPSAGVPCANSPLGSNQPAQGLPEPTQIVDETLSLPEGRRSEDMIACPETETPAVITCDPLSQPSPQPADFTETETILQPANKVESVSSEETFEPSQELPAEALRDPSLQDALEVDLAVSVSQISIEEKVKELSPEEERRKWEEGRIDYMGKDAFARIQEKLDRFLQ

SEQ ID NO: 4376 - protein, 195 aa, Homo sapiens
MDELRWYHITVCLDHIFGHNCSLSCKDCMNGGKCQEGKSECSCPAGCRVILCNENCLEGAYGAGCTSECQCVEENTLECSAKNGSCTCKSGYQGNRCQKDGLWGPEGWFSSAPCENGGQCNKKTGNCDCTPDYTRKSCTILRCISLTNLALSRRSSPMKYQQNVSSHREVRQRQQCSSDRPFKKLLCKFSFKIGM

SEQ ID NO: 4377 - protein, 911 aa, Homo sapiens
MVDYHAANQSYQYGPSSAGNGAGGGGSMGDYMAQEDDWDRDLLLDPAWEKQQRKTFTAWCNSHLRKAGTQIENIDEDFRDGLKLMLLLEVISGERLPKPERGKMRVHKINNVNKALDFIASKGVKLVSIGAEEIVDGNAKMTLGMIWTIILRFAIQDISVEETSAKEGLLLWCQRKTAPYKNVNVQNFHISWKDGLAFNALIHRHRPELIEYDKLRKDDPVTNLNNAFEVAEKYLDIPKMLDAEDIVNTARPDEKAIMTYVSSFYHAFSGAQKAETAANRICKVLAVNQENEHLMEDYEKLASDLLEWIRRTIPWLEDRVPQKTIQEMQQKLEDFRDYRRVHKPPKVQEKCQLEINFNTLQTKLRLSNRPAFMPSEGKMVSDINNGWQHLEQAEKGYEEWLLNEIRRLERLDHLAEKFRQKASIHEAWTDGKEAMLKHRDYETATLSDIKALIRKHEAFESDLAAHQDRVEQIAAIAQELNELDYYDSHNVNTRCQKICDQWDALGSLTHSRREALEKTEKQLEAIDQLHLEYAKRAAPFNNWMESAMEDLQDMFIVHTIEEIEGLISAHDQFKSTLPDADREREAILAIHKEAQRIAESNHIKLSGSNPYTTVTPQIINSKWEKVQQLVPKRDHALLEEQSKQQSNEHLRRQFASQANVVGPWIQTKMEEIGRISIEMNGTLEDQLSHLKQYERSIVDYKPNLDLLEQQHQLIQEALIFDNKHTNYTMEHIRVGWEQLLTTIARTINEVENQILTRDAKGISQEQMQEFRASFNHFDKDHGGALGPEEFKACLISLGYDVENDRQGEAEFNRIMSLVDPNHSGLVTFQAFIDFMSRETTDTDTADQVIASFKVLAGDKNFITAEELRRELPPDQAEYCIARMAPYQGPDAVPGALDYKSFSTALYGESDL

SEQ ID NO: 4378 - protein, 756 aa, Homo sapiens
MDSGRDFLTLHGLQDDEDLQALLKGSQLLKVKSSSWRRERFYKLQEDCKTIWQESRKVMRTPESQLFSIEDIQEVRMGHRTEGLEKFARDVPEDRCFSIVFKDQRNTLDLIAPSPADAQHWVLGLHKIIHHSGSMDQRQKLQHWIHSCLRKADKNKDNKMSFKELQNFLKELNIQVDDSYARKIFRECDHSQTDSLEDEEIEAFYKMLTQRVEIDRTFAEAAGSGETLSVDQLVTFLQHQQREEAAGPALALSLIERYEPSETAKAQRQMTKDGFLMYLLSADGSAFSLAHRRVYQDMGQPLSHYLVSSSHNTYLLEDQLAGPSSTEAYIRALCKGCRCLELDCWDGPNQEPIIYHGYTFTSKILFCDVLRAIRDYAFKASPYPVILSLENHCTLEQQRVMARHLHAILGPMLLNRPLDGVTNSLPSPEQLKGKILLKGKKLGGLLPPGGEGGPEATVVSDEDEAAEMEDEAVRSRVQHKPKEDKLRLAQELSDMVIYCKSVHFGGFSSPGTPGQAFYEMASFSENRALRLLQESGNGFVRHNVGHLSRIYPAGWRTDSSNYSPVEMWNGGCQIVALNFQTPGPEMDVYQGRFQDNGACGYVLKPAFLRDPNGTFNPRALAQGPWWARKRLNIRVISGQQLPKVNKNKNSIVDPKVTVEIHGVSRDVASRQTAVITNNGFNPWWDTEFAFEVVVPDLALIRFLVEDYDASSKNDFIGQSTIPLNSLKQGYRHVHLMSKNGDQHPSATLFVKISLQD

SEQ ID NO: 4379 - protein, 582 aa, Homo sapiens [sequence omitted]

SEQ ID NO: 4380 - protein, 92 aa, Homo sapiens
MVTVRASLQSEFVCLILSDTSDAVKQGQSGSWIVTTHADIKQTLPSGTEGTTVTRNCCPFIPGFRRLYQKEWKMLVGSKIETASEDWFCTKP

SEQ ID NO: 4381 - protein, 55 aa, Homo sapiens
MHEQTENFHKEIKDNKKYKVEEYNNWTQKFNVSNRRIDEAEERAIKLVDRPLEIM

SEQ ID NO: 4382 - protein, 170 aa, Homo sapiens
MKTLFLGVTLGLAAALSFTLEEEDITGTWYVKAMVVDKDFPEDRRPRKVSPVKVTALGGGNLEATFTFMREDRCIQKKILMRKTEEPGKFSAYGGRKLIYLQELPGTDDYVFYCKDQRRGGLRYMGKLVGRNPNTNLEALEEFKKLVQHKGLSEEDIFMPLQTGSCVLEH

SEQ ID NO: 4383 - protein, 1184 aa, Homo sapiens
MEVDTEEKRHRTRSKGVRVPVEPAIQELFSCPTPGCDGSGHVSGKYARHRSVYGCPLAKKRKTQDKQPQEPAPKRKPFAVKADSSSVDECDDSDGTEDMDEKEEDEGEEYSEDNDEPGDEDEEDEEGDREEEEEIEEEDEDDDEDGEDVEDEEEEEEEEEEEEEEEENEDHQMNCHNTRIMQDTEKDDNNNDEYDNYDELVAKSLLNLGKIAEDAAYRARTESEMNSNTSNSLEDDSDKNENLGRKSELSLDLDSDVVRETVDSLKLLAQGHGVVLSENMNDRNYADSMSQQDSRNMNYVMLGKPMNNGLMEKMVEESDEEVCLSSLECLRNQCFDLARKLSETNPQERNPQQNMNIRQHVRPEEDFPGRTPDRNYSDMLNLMRLEEQLSPRSRVFASCAKEDGCHERDDDTTSVNSDRSEEVFDMTKGNLTLLEKAIALETERAKAMREKMAMEAGRRDNMRSYEDQSPRQLPGEDRKPKSSDSHVKKPYYDPSRTEKKESKCPTPGCDGTGHVTGLYPHHRSLSGCPHKDRVPPEILAMHESVLKCPTPGCTGRGHVNSNRNSHRSLSGCPIAAAEKLAKAQEKHQSCDVSKSSQASDRVLRPMCFVKQLEIPQYGYRNNVPTTTPRSNLAKELEKYSKTSFEYNSYDNHTYGKRAIAPKVQTRDISPKGYDDAKRYCKDPSPSSSSTSSYAPSSSSNLSCGGGSSASSTCSKSSFDYTHDMEAAHMAATAILNLSTRCREMPQNLSTKPQDLCATRNPDMEVDENGTLDLSMNKQRPRDSCCPILTPLEPMSPQQQAVMNNRCFQLGEGDCWDLPVDYTKMKPRRIDEDESKDITPEDLDPFQEALEERRYPGEVTIPSPKPKYPQCKESKKDLITLSGCPLADKSIRSMLATSSQELKCPTPGCDGSGHITGNYASHRSLSGCPRAKKSGIRIAQSKEDKEDQEPIRCPVPGCDGQGHITGKYASHRSASGCPLAAKRQKDGYLNGSQFSWKSVKTEGMSCPTPGCDGSGHVSGSFLTHRSLSGCPRATSAMKKAKLSGEQMLTIKQRASNGIENDEEIKQLDEEIKELNESNSQMEADMIKLRTQITTMESNLKTIEEENKVIEQQNESLLHELANLSQSLIHSLANIQLPHMDPINEQNFDAYVTTLTEMYTNQDRYQSPENKALLENIKQAVRGIQV

SEQ ID NO: 4384 - protein, 102 aa, Homo sapiens
MAGQAFRKFLPLFDRVLVERSAAETVTKGGIMLPEKSQGKVLQATVVAVGSGSKGKGGEIQPVSVKVGDKVLLPEYGGTKVVLDDKDYFLFRDGDILGKYVD

SEQ ID NO: 4385 - protein, 624 aa, Homo sapiens
MQPDPRPSGAGACCRFLPLQSQCPEGAGDAVMYASTECKAEVTPSQHGNRTFSYTLEDHTKQAFGIMNELRLSQQLCDVTLQVKYQDAPAAQFMAHKVVLASSSPVFKAMFTNGLREQGMEVVSIEGIHPKVMERLIEFAYTASISMGEKCVLHVMNGAVMYQIDSVVRACSDFLVQQLDPSNAIGIANFAEQIGCVELHQRAREYIYMHFGEVAKQEEFFNLSHCQLVTLISRDDLNVRCESEVFHACINWVKYDCEQRRFYVQALLRAVRCHSLTPNFLQMQLQKCEILQSDSRCKDYLVKIFEELTLHKPTQVMPCRAPKVGRLIYTAGGYFRQSLSYLEAYNPSDGTWLRLADLQVPRSGLAGCVVGGLLYAVGGRNNSPDGNTDSSALDCYNPMTNQWSPCAPMSVPRNRIGVGVIDGHIYAVGGSHGCIHHNSVERYEPERDEWHLVAPMLTRRIGVGVAVLNRLLYAVGGFDGTNRLNSAECYYPERNEWRMITAMNTIRSGAGVCVLHNCIYAAGGYDGQDQLNSVERYDVETETWTFVAPMKHRRSALGITVHQGRIYVLGGYDGHTFLDSVECYDPDTDTWSEVTRMTSGRSGVGVAVTMEPCRKQIDQQNCTC

SEQ ID NO: 4386 - protein, 391 aa, Homo sapiens
MADIDNKEQSELDQDLDDVEEVEEEETGEETKLKARQLTVQMMQNPQILAALQERLDGLVETPTGYIESLPRVVKRRVNALKNLQVKCAQIEAKFYEEVHDLERKYAVLYQPLFDKRFEIINAIYEPTEEECEWKPDEEDEISEELKEKAKIEDEKKDEEKEDPKGIPEFWLTVFKNVDLLSDMVQEHDEPILKHLKDIKVKFSDAGQPMSFVLEFHFEPNEYFTNEVLTKTYRMRSEPDDSDPFSFDGPEIMGCTGCQIDWKKGKNVTLKTIKKKQKHKGRGTVRTVTKTVSNDSFFNFFAPPEVPESGDLDDDAEAILAADFEIGHFLRERIIPRSVLYFTGEAIEDDDDDYDEEGEEADEEGEEEGDEENDPDYDPKKDQNPAECKQQ

SEQ ID NO: 4387 - protein, 335 aa, Homo sapiens
MEDSGKTFSSEEEEANYWKDLAMTYKQRAENTQEELREFQEGSREYEAELETQLQQIETRNRDLLSENNRLRMELETIKEKFEVQHSEGYRQISALEDDLAQTKAIKDQLQKYIRELEQANDDLERAKRATIMSLEDFEQRLNQAIERNAFLESELDEKENLLESVQRLKDEARDLRQELAVQQKQEKPRTPMPSSVEAERTDTAVQATGSVPSTPIAHRGPSSSLNTPGSFRRGLDDSTGGTPLTPAARISALNIVGDLLRKVGALESKLASCRNLVYDQSPNRTGGPASGRSSKNRDGGERRPSSTSVPLGDKGLDTSCRWLSKSTTRSSSSC

SEQ ID NO: 4388 - protein, 349 aa, Homo sapiens
MAASEAAVVSSPSLKTDTSPVLETAGTVAAMAATPSARAAAAVVAAAARTGSEARVSKAALATKLLSLSGVFAVHKPKGPTSAELLNRLKEKLLAEAGMPSPEWTKRKKQTLKIGHGGTLDSAARGVLVVGIGSGTKMLTSMLSGSKRYTAIGELGKATDTLDSTGRVTEEKPYDKITQEDIEGILQKFTGNIMQVPPLYSALKKDGQRLSTLMKRGEVVEAKPARPVTVYSISLQKFQPPFFTLDVECGGGFYIRSLVSDIGKELSSCANVLELTRTKQGPFTLEEHALPEDKWTIDDIAQSLEHCSSLFPAELALKKSKPESNEQVLSCEYITLNEPKREDDVIKTC

SEQ ID NO: 4389 - protein, 514 aa, Homo sapiens
MADYLISGGTSYVPDDGLTAQQLFNCGDGLTYNDFLILPGYIDFTADQVDLTSALTKKITLKTPLVSSPMDTVTEAGMAIAMALTGGIGFIHHNCTPEFQANEVRKVKKYEQGFITDPVVLSPKDRVRDVFEAKARHGFCGIPITDTGRMGSRLVGIISSRDIDFLKEEEHDCFLEEIMTKREDLVVAPAGITLKEANEILQRSKKGKLPIVNEDDELVAIIARTDLKKNRDYPLASKDAKKQLLCGAAIGTHEDDKYRLDLLAQAGVDVVVLDSSQGNSIFQINMIKYIKDKYPNLQVIGGNVVTAAQAKNLIDAGVDALRVGMGSGSICITQEVLACGRPQATAVYKVSEYARRFGVPVIADGGIQNVGHIAKALALGASTVMMGSLLAATTEAPGEYFFSDGIRLKKYRGMGSLDAMDKHLSSQNRYFSEADKIKVAQGVSGAVQDKGSIHKFVPYLIAGIQHSCQDIGAKSLTQVRAMMYSGELKFEKRTSSAQVEGGVHSLHSYEKRLF

SEQ ID NO: 4390 - protein, 329 aa, Homo sapiens
MSGVVPTAPEQPAGEMENQTKPPDPRPDAPPEYSSHFLPGPPGTAVPPPTGYPGGLPMGYYSPQQPSTFPLYQPVGGIHPVRYQPGKYPMPNQSVPITWMPGPTPMANCPPGLEYLVQLDNIHVLQHFEPLEMMTCFETNNRYDIKNNSDQMVYVVTEDTDDFTRNAYRTLRPFVLRVTDCMGREIMTMQRPFRCTCCCFCCPSARQELEVQCPPGVTIGFVAEHWNLCRAVYSIQNEKKENVMRVRGPCSTYGCGSDSVFEVKSLDGISNIGSIIRKWNGLLSAMADADHFDIHFPLDLDVKMKAMIFGACFLIDFMYFERSPPQRSR

SEQ ID NO: 4391 - protein, 642 aa, Homo sapiens [sequence omitted]

SEQ ID NO: 4392 - protein, 716 aa, Homo sapiens
MGETKIIYHLDGQETPYLVKLPLPAERVTLADFKGVLQRPSYKFFFKSMDDDFGVVKEEISDDNAKLPCFNGRVVSWLVSAEGSHPDPAPFCADNPSELPPPMERTGGIGDSRPPSFHPHAGGGSQENLDNDTETDSLVSAQRERPRRRDGPEHATRLNGTAKGERRREPGGYDSSSTLMSSELETTSFFDSDEDDSTSRFSSSTEQSSASRLMRRHKRRRRKQKVSRIERSSSFSSITDSTMSLNIITVTLNMEKYNFLGISIVGQSNERGDGGIYIGSIMKGGAVAADGRIEPGDMLLQVNEINFENMSNDDAVRVLREIVHKPGPITLTVAKCWDPSPRGCFTLPRSEPIRPIDPAAWVSHTAAMTGTFPAYGMSPSLSTITSTSSSITSSIPDTERLDDFHLSIHSDMAAIVKAMASPESGLEVRDRMLLKITIPNAFIGSDVVDWLYHNVEGFTDRREARKYASNLLKAGFIRHTVNKITFSEQCYYIFGDLCGNMANLSLHDHDGSSGASDQDTLAPLPHPGAAPWPMAFPYQYPPPPHPYNPHPGFPELGYSYGGGSASSQHSEGSRSSGSNRSGSDRRKEKDPKAGDSKSGGSGSESDHTTRSSLRGPRERAPSERSGPAASEHSHRSHHSLASSLRSHHTHPSYGPPGVPPLYGPPMLMMPPPPAAMGPPGAPPGRDLASVPPELTASRQSFRMAMGNPSEFFVDVM

SEQ ID NO: 4393 - protein, 412 aa, Homo sapiens
MIGMLESLQHESDLLQHDQIHTGEKPYECNECRKTFSLKQNLVEHKKMHTGEKSHECTECGKVCSRVSSLTLHLRSHTGKKAYKCNKCGKAFSQKENFLSHQKHHTGEKPYECEKVSIQMPTIIRHQKNHTGTKPYACKECGKAFNGKAYLTEHEKIHTGEKPFECNQCGRAFSQKQYLIKHQNIHTGKKPFKCSECGKAFSQKENLIIHQRIHTGEKPYECKGCGKAFIQKSSLIRHQRSHTGEKPYTCKECGKAFSGKSNLTEHEKIHIGEKPYKCNECGTIFRQKQYLIKHHNIHTGEKPYECNKCGKAFSRITSLIVHVRIHTGDKPYECKVCGKAFCQSSSLTVHMRSHTGEKPYGCNECGKAFSQFSTLALHMRIHTGEKPYQCSECGKAFSQKSHHIRHQRIHTH

SEQ ID NO: 4394 - protein, 574 aa, Homo sapiens
MALKGRALYDFHSENKEEISIQQDEDLVIFSETSLDGWLQGQNSRGETGLFPASYVEIVRSGISTNHADYSSSPAGSPGAQVSLYNSPSVASPARSGGGSGFLSNQGSFEEDDDDDWDDWDDGCTVVEEPRAGGLGTNGHPPLNLSYPGAYPSQHMAFRPKPPLERQDSLASAKRGSVVGRNLNRFSCFVRSGVEAFILGDVPMMAKIAETYSIEMGPRGPQWKANPHPFACSVEDPTKQTKFKGIKSYISYKLTPTHAASPVYRRYKHFDWLYNRLLHKFTVISVPHLPEKQATGRFEEDFIEKRKRRLILWMDHMTSHPVLSQYEGFQHFLSCLDDKQWKMGKRRAEKDEMVGASFLLTFQIPTEHQDLQDVEDRVDTFKAFSKKMDDSVLQLSTVASELVRKHVGGFRKEFQKLGSAFQAISHSFQMDPPFCSEALNSAISHTGRTYEAIGEMFAEQPKNDLFQMLDTLSLYQGLLSNFPDIIHLQKGAFAKVKESQRMSDEGRMVQDEADGIRRRCRVVGFALQAEMNHFHQRRELDFKHMMQNYLRQQILFYQRVGQQLEKTLRMYDNL

SEQ ID NO: 4395 - protein, 190 aa, Homo sapiens
MFQVPDSEGGRAGSRAMKPPGGESSNLFGSPEEATPSSRPNRMASNIFGPTEEPQNIPKRTNPPGGKGSGIFDESTPVQTRQHLNPPGGKTSDIFGSPVTATSRLAHPNKPKDHVFLCEGEEPKSDLKAARSIPAGAEPGEKGSARKAGPAKEQEPMPTVDSHEPRLGPRPRSHNKVLNPPGGKSSISFY

SEQ ID NO: 4396 - protein, 208 aa, Homo sapiens [sequence omitted]

SEQ ID NO: 4397 - protein, 349 aa, Homo sapiens
MEEEKYLPELMAEKDSLDPSFVHASRLLAEEIEKFQGSDGKKEDEEKKYLDVISNKNIKLSERVLIPVKQYPKFNFVGKLLGPRGNSLKRLQEETGAKMSILGKGSMRDKAKEEELRKSGEAKYAHLSDELHVLIEVFAPPGEAYSRMSHALEEIKKFLVPDYNDEIRQEQLRELSYLNGSEDSGRGRGIRGRGIRIAPTAPSRGRGGAIPPPPPPGRGVLTPRGSTVTRGALPVPPVARGVPTPRARGAPTVPGYRAPPPPAHEAYEEYGYDDGYGGEYDDQTYETYDNSYATQTQSVPEYYDYGHGVSEDAYDSYAPEEWATTSSSLKAPPQRSARGGYREHPYGRY

SEQ ID NO: 4398 - protein, 255 aa, Homo sapiens
MVLLLVILIPVLVSSAGTSAHYEMLGTCRMVCDPYGGTKAPSTAATPDRGLMQSLPTFIQGPKGEAGRPGKAGPRGPPGEPGPPGPMGPPGEKGEPGRQGLPGPPGAPGLNAAGAISAATYSTVPKIAFYAGLKRQHEGYEVLKFDDVVTNLGNHYDPTTGKFTCSIPGIYFFTYHVLMRGGDGTSMWADLCKNNQVRASAIAQDADQNYDYASNSVVLHLEPGDEVYIKLDGGKAHGGNNNKYSTFSGFIIYAD

SEQ ID NO: 4399 - protein, 154 aa, Homo sapiens
MPSRTARYARYSPRQRRRRMLADRSVRFPNDVLFLDHIRQGDLEQVGRFIRTRKVSLATIHPSGLAALHEAVLSGNLECVKLLVKYGADIHQRDEAGWTPLHIACSDGYPDIARYLISLGADRDATNDDGDLPSDLIDPDYKELVELFKGTTMD

SEQ ID NO: 4400 - protein, 299 aa, Homo sapiens
MGGPRALLAALWALEAAGTAALRIGAFNIQSFGDSKVSDPACGSIIAKILAGYDLALVQEVRDPDLSAVSALMEQINSVSEHEYSFVSSQPLGRDQYKEMYLFVYRKDAVSVVDTYLYPDPEDVFSREPFVVKFSAPGTGERAPPLPSRRALTPPPLPAAAQNLVLIPLHAAPHQAVAEIDALYDVYLDVIDKWGTDDMLFLGDFNADCSYVRAQDWAAIRLRSSEVFKWLIPDSADTTVGNSDCAYDRIVACGARLRRSLKPQSATVHDFQEEFGLDQTQALAISDHFPVEVTLKFHR

SEQ ID NO: 4401 - protein, 358 aa, Homo sapiens
MSVGHKAQESKIRYKTNEPVWEENFTFFIHNPKRQDLEVEVRDEQHQCSLGNLKVPLSQLLTSEDMTVSQRFQLSNSGPNSTIKMKIALRVLHLEKRERPPDHQHSAQVKRPSVSKEGRKTSIKSHMSGSPGPGGSNTAPSTPVIGGSDKPGMEEKAQPPEAGPQGLHDLGRSSSSLLASPGHISVKEPTPSIASDISLPIATQELRQRLRQLENGTTLGQSPLGQIQLTIRHSSQRNKLIVVVHACRNLIAFSEDGSDPYVRMYLLPDKRRSGRRKTHVSKKTLNPVFDQSFDFSVSLPEVQRRTLDVAVKNSGGFLSKDKGLLGKVLVALASEELAKGWTQWYDLTEDGTRPQAMT

SEQ ID NO: 4402 - protein, 89 aa, Homo sapiens
MKGLAAALLVLVCTMALCSCAQVGTNKELCCLVYTSWQIPQKFIVDYSETSPQCPKPGVILLTKRGRQICADPNKKWVQKYISDLKLNA

SEQ ID NO: 4403 - protein, 526 aa, Homo sapiens
MPPNKEASGLSSSPAGLICLPPISEELQLVWTQAAQTSELDSNEHLLKTFSYFPYPSLADIALLCLRYGLQMEKVKTWFMAQRLRCGISWSSEEIEETRARVVYRRDQLHFKSLLSFTHHAGRPPEEVPPPPVPAPEQVGIGIGPPTLSKPTQTKGLKVEPEEPSQMPPLPQSHQKLKESLMTPGSGAFPYQSDFWQHLQSSGLSKEQAGRGPNQSHGIGTASWNHSTTVPQPQARDKPPPIALIASSCKEESASSVTPSSSSTSSSFQVLANGATAASKPLQPLGCVPQSVSPSEQALPPHLEPAWPQGLRHNSVPGRVGPTEYLSPDMQRQRKTKRKTKEQLAILKSFFLQCQWARREDYQKLEQITGLPRPEIIQWFGDTRYALKHGQLKWFRDNAVPGAPSFQDPAIPTPPPSTRSLNERAETPPLPIPPPPPDIQPLERYWAAHQQLRETDIPQLSQASRLSTQQVLDWFDSRLPQPAEVVVCLDEEEEEEEEELPEDDEEEEEEEEEDDDDDDDDVIIQD

SEQ ID NO: 4404 - protein, 520 aa, Homo sapiens
MSLSRSEEMHRLTENVYKTIMEQFNPSLRNFIAMGKNYEKALAGVTYAAKGYFDALVKMGELASESQGSKELGDVLFQMAEVHRQIQNQLEEMLKSFHNELLTQLEQKVELDSRYLSAALKKYQTEQRSKGDALDKCQAELKKLRKKSQGSKNPQKYSDKELQYIDAISNKQGELENYVSDGYKTALTEERRRFCFLVEKQCAVAKNSAAYHSKGKELLAQKLPLWQQACADPSKIPERAVQLMQQVASNGATLPSALSASKSNLVISDPIPGAKPLPVPPELAPFVGRMSAQESTPIMNGVTGPDGEDYSPWADRKAAQPKSLSPPQSQSKLSDSYSNTLPVRKSVTPKNSYATTENKTLPRSSSMAAGLERNGRMRVKAIFSHAAGDNSTLLSFKEGDLITLLVPEARDGWHYGESEKTKMRGWFPFSYTRVLDSDGSDRLHMSLQQGKSSSTGNLLDKDDLAIPPPDYGAASRAFPAQTASGFKQRPYSVAVPAFSQGLDDYGARSMSSADVEVARF

SEQ ID NO: 4405 - protein, 469 aa, Homo sapiens
MSALTPPTDMPTPTTDKITQAAMETIYLCKFRVSMDGEWLCLRELDDISLTPDPEPTHEDPNYLMANERMNLMNMAKLSIKGLIESALNLGRTLDSDYAPLQQFFVVMEHCLKHGLKAKKTFLGQNKSFWGPLELVEKLVPEAAEITASVKDLPGLKTPVGRGRAWLRLALMQKKLSEYMKALINKKELLSEFYEPNALMMEEEGAIIAGLLVGLNVIDANFCMKGEDLDSQVGVIDFSMYLKDGNSSKGTEGDGQITAILDQKNYVEELNRHLNATVNNLQAKVDALEKSNTKLTEELAVANNRIITLQEEMERVKEESSYILESNRKGPKQDRTAEGQALSEARKHLKEETQLRLDVEKELEMQISMRQEMELAMKMLEKDVCEKQDALVSLRQQLDDLRALKHELAFKLQSSDLGVKQKSELNSRLEEKTNQMAATIKQLEQSEKDLVKQAKTLNSAANKLIPKHH

SEQ ID NO: 4406 - protein, 402 aa, Homo sapiens
MMVHCAGCERPILDRFLLNVLDRAWHIKCVQCCECKTNLSEKCFSREGKLYCKNDFFRRFGTKCAGCAQGISPSDLVRKARSKVFHLNCFTCMVCNKQLSTGEELYVIDENKFVCKDDYLSSSSLKEGSLNSVSSCTDRSLSPDLQDALQDDPKETDNSTSSDKETANNENEEQNSGTKRRGPRTTIKAKQLETLKAAFAATPKPTRHIREQLAQETGLNMRVIQVWFQNRRSKERRMKQLSALGARRHAFFRSPRRMRPLGGRLDESEMLGSTPYTYYGDYQGDYYAPGSNYDFFAHGPPSQAQSPADSSFLAASGPGSTPLGALEPPLAGPHAADNPRFTDMISHPDTPSPEPGLPGTLHPMPGEVFSGGPSPPFPMSGTSGYSGPLSHPNPELNEAAVW

SEQ ID NO: 4407 - protein, 217 aa, Homo sapiens [sequence omitted]

SEQ ID NO: 4408 - protein, 497 aa, Homo sapiens [sequence omitted]

SEQ ID NO: 4409 - protein, 367 aa, Homo sapiens
MASELCKTISVARLEKHKNLFLNYRNLHHFPLELLKDEGLQYLERLYMKRNSLTSLPENLAQKLPNLVELYLHSNNIVVVPEAIGSLVKLQCLDLSDNALEIVCPEIGRLRALRHLRLANNQLQFLPPEVGDLKELQTLDISTNRLLTLPERLHMCLSLQYLTVDRNRLWYVPRHLCQLPSLNELSMAGNRLAFLPLDLGRSRELQYVYVDNNIHLKGLPSYLYNKVIGCSGCGAPIQVSEVKLLSFSSGQRTVFLPAEVKAIGTEHDHVLPLQELAMRGLYHTYHSLLKDLNFLSPISLPRSLLELLHCPLGHCHRCSEPMFTIVYPKLFPLRETPMAGLHQWKTTVSFVAYCCSTQCLQTFDLLS

SEQ ID NO: 4410 - protein, 139 aa, Homo sapiens
MVTHAAGARTFCEEQKKGSTYSVPKSKEKLMEKHSQEARQADRESEKPVDSLHPGAGTAKHPPPAASLEEKPDVKQKSSRKKVVVPQIIITRASNETLVSCSSSGSDQQRTIREPEDWGPYRRHRNPSTADAYNSHLKE

SEQ ID NO: 4411 - protein, 939 aa, Homo sapiens
MKVARFQKIPNGENETMIPVLTSKKASELPVSEVASILQADLQNGLNKCEVSHRRAFHGWNEFDISEDEPLWKKYISQFKNPLIMLLLASAVISVLMHQFDDAVSITVAILIVVTVAFVQEYRSEKSLEELSKLVPPECHCVREGKLEHTLARDLVPGDTVCLSVGDRVPADLRLFEAVDLSIDESSLTGETTPCSKVTAPQPAATNGDLASRSNIAFMGTLVRCGKAKGVVIGTGENSEFGEVFKMMQAEEAPKTPLQKSMDLLGKQLSFYSFGIIGIIMLVGWLLGKDILEMFTISVSLAVAAIPEGLPIVVTVTLALGVMRMVKKRAIVKKLPIVETLGCCNVICSDKTGTLTKNEMTVTHIFTSDGLHAEVTGVGYNQFGEVIVDGDVVHGFYNPAVSRIVEAGCVCNDAVIRNNTLMGKPTEGALIALAMKMGLDGLQQDYIRKAEYPFSSEQKWMAVKCVHRTQQDRPEICFMKGAYEQVIKYCTTYQSKGQTLTLTQQQRDVYQQEKARMGSAGLRVLALASGPELGQLTFLGLVGIIDPPRTGVKEAVTTLIASGVSIKMITGDSQETAVAIASRLGLYSKTSQSVSGEEIDAMDVQQLSQIVPKVAVFYRASPRHKMKIIKSLQKNGSVVAMTGDGVNDAVALKAADIGVAMGQTGTDVCKEAADMILVDDDFQTIMSAIEEGKGIYNNIKNFVRFQLSTSIAALTLISLATLMNFPNPLNAMQILWINIIMDGPPAQSLGVEPVDKDVIRKPPRNWKDSILTKNLILKILVSSIIIVCGTLFVFWRELRDNVITPRDTTMTFTCFVFFDMFNALSSRSQTKSVFEIGLCSNRMFCYAVLGSIMGQLLVIYFPPLQKVFQTESLSILDLLFLLGLTSSVCIVAEIIKKVERSREKIQKHVWLWERSGQQLVEIHPHLETGLPLTEDVSCV

SEQ ID NO: 4412 - protein, 1034 aa, Homo sapiens
MPRRKQQAPKRAAGYAQEEQLKEEEEIKEEEEEEDSGSVAQLQGGNDTGTDEELETGPEQKGCFSYQNSPGSHLSNQDAENESLLSDASDQVSDIKSVCGRDASDKKAHTHVRLPNEAHNCMDKMTAVYANILSDSYWSGLGLGFKLSNSERRNCDTRNGSNKSDFDWHQDALSKSLQQNLPSRSVSKPSLFSSVQLYRQSSKMCGTVFTGASRFRCRQCSAAYDTLVELTVHMNETGHYQDDNRKKDKLRPTSYSKPRKRAFQDMDKEDAQKVLKCMFCGDSFDSLQDLSVHMIKTKHYQKVPLKEPVPTISSKMVTPAKKRVFDVNRPCSPDSTTGSFADSFSSQKNANLQLSSNNRYGYQNGASYTWQFEACKSQILKCMECGSSHDTLQQLTTHMMVTGHFLKVTSSASKKGKQLVLDPLAVEKMQSLSEAPNSDSLAPKPSSNSASDCTASTTELKKESKKERPEETSKDEKVVKSEDYEDPLQKPLDPTIKYQYLREEDLEDGSKGGGDILKSLENTVTTAINKAQNGAPSWSAYPSIHAAYQLSEGTKPPLPMGSQVLQIRPNLTNKLRPIAPKWKVMPLVSMPTHLAPYTQVKKESEDKDEAVKECGKESPHEEASSFSHSEGDSFRKSETPPEAKKTELGPLKEEEKLMKEGSEKEKPQPLEPTSALSNGCALANHAPALPCINPLSALQSVLNNHLGKATEPLRSPSCSSPSSSTISMFHKSNLNVMDKPVLSPASTRSASVSRRYLFENSDQPIDLTKSKSKKAESSQAQSCMSPPQKHALSDIADMVKVLPKATTPKPASSSRVPPMKLEMDVRRFEDVSSEVSTLHKRKGRQSNWNPQHLLILQAQFASSLFQTSEGKYLLSDLGPQERMQISKFTGLSMTTISHWLANVKYQLRKTGGTKFLKNMDKGHPIFYCSDCASQFRTPSTYISHLESHLGFQMKDMTRLSVDQQSKVEQEISRVSSAQRSPETIAAEEDTDSKFKCKLCCRTFVSKHAVKLHLSKTHSKSPEHHSQFVTDVDEE

SEQ ID NO: 4413 - protein, 252 aa, Homo sapiens
MFFWCACCLMVAWRVSASDAEHCPELPPVDNSIFVAKEVEGQILGTYVCIKGYHLVGKKTLFCNASKEWDNTTTECRLGHCPDPVLVNGEFSSSGPVNVSDKITFMCNDHYILKGSNRSQCLEDHTWAPPFPICKSRDCDPPGNPVHGYFEGNNFTLGSTISYYCEDRYYLVGVQEQQCVDGEWSSALPVCKLIQEAPKPECEKALLAFQESKNLCEAMENFMQQLKESGMTMEELKYSLELKKAELKAKLL

SEQ ID NO: 4414 - protein, 275 aa, Homo sapiens
MEEVREGHALGGGMEADGPASLQELPPSPRSPSPPPSPPPLPSPPSLPSPAAPEAPELPEPAQPSEAHARQLLLEEWGPLSGGLELPQRLTWKLLLLRRPLYRNLLRSPNPEGINIYEPAPPTGPTQRPLETLGNFRGWYIRTEKLQQNQSWTVKQQCVDLLAEGLWEELLDDEQPAITVMDWFEDSRLDACVYELHVWLLAADRRTVIAQHHVAPRTSGRGPPGRWVQVSHVFRHYGPGVRFIHFLHKAKNRMEPGGLRRTRVTDSSVSVQLRE

SEQ ID NO: 4415 - protein, 550 aa, Homo sapiens
MSHGPSPRLAESPQLSKGSLLTILGSPSPERMGPADSLPPTPPSGTPSPGPPPALPLPPAPALLADGDWESREELRLRELEEARARAAQMEKTMRWWSDCTANWREKWSKVRAERNRAREEVRQLRQRLDALTKELAGARRERQEAQGECEARGRELARLRGARGVADQTRDGPEPEAEREPVRDVGSERPPGSQELELVESLLKSMPEESEDCWEARSLGAGGPRGSSGRQERSRLPWEDTAATEEEASKLTALRLRLDESQKVLLKEREDKLALSRNIEKLEGELSQWKIKYEELSKTKQEMLKQLSILKEAHQDELGRMSEDLEDELGARSSMDRKMAELRGEMERLQAENAAEWGRRERLETEKLGLERENKKLRAQVGDLEEALARRRRQTASALDCDLRASQAALFEKNKELADLKHVHGKLKKQFQEKVAELAHANRRVEQHEAEVKKLRLRVEELKKELAQAEDELDEAHNQARKLQRSLDEQTEQSENLQVQLEHLQSRLRRQQQNAPLFGKIRSARFGTEEAEDGTSDLDEDEDLQIQVA

SEQ ID NO: 4416 - protein, 593 aa, Homo sapiens
MTAEDSTAAMSSDSAAGSSAKVPEGVAGAPNEAALLALMERTGYSMVQENGQRKYGGPPPGWEGPHPQRGCEVFVGKIPRDVYEDELVPVFEAVGRIYELRLMMDFDGKNRGYAFVMYCHKHEAKRAVRELNNYEIRPGRLLGVCCSVDNCRLFIGGIPKMKKREEILEEIAKVTEGVLDVIVYASAADKMKNRGFAFVEYESHRAAAMARRKLMPGRIQLWGHQIAVDWAEPEIDVDEDVMETVKILYVRNLMIETTEDTIKKSFGQFNPGCVERVKKIRDYAFVHFTSREDAVHAMNNLNGTELEGSCLEVTLAKPVDKEQYSRYQKAARGGGAAEAAQQPSYVYSCDPYTLAYYGYPYNALIGPNRDYFVKAGSIRGRGRGAAGNRAPGPRGSYLGGYSAGRGIYSRYHEGKGKQQEKGYELVPNLEIPTVNPVAIKPGTVAIPAIGAQYSMFPAAPAPKMIEDGKIHTVEHMISPIAVQPDPASAAAAAAAAAAAAAAVIPTVSTPPPFQGRPITPVYTVAPNVQRIPTAGIYGASYVPFAAPATATIATLQKNAAAAAAVYGGYAGYIPQAFPAAAIQVPIPDVYQTY

SEQ ID NO: 4417 - protein, 282 aa, Homo sapiens
MPLLTQQIQDEDDQYSLVASLDNVRNLSTILKAIHFREHATCFATKNGIKVTVENAKCVQANAFIQAGIFQEFKVQEESVTFRINLTVLLDCLSIFGSSPMPGTLTALRMCYQGYGYPLMLFLEEGGVVTVCKINTQEPEETLDFDFCSTNVINKIILQSEGLREAFSELDMTSEVLQITMSPDKPYFRLSTFGNAGSSHLDYPKDSDLMEAFHCNQTQVNRYKISLLKPSTKALVLSCKVSIRTDNRGFLSLQYMIRNEDGQICFVEYYCCPDEEVPESES

SEQ ID NO: 4418 - protein, 436 aa, Homo sapiens
MLLSPKFSLSTIHIRLTAKGLLRNLRLPSGFRRSTVVFHTVEKSRQKNPRSLCIQPQTAPDALPPEKTLELTQYKTKCENQSGFILQLKQLLACGNTKFEALTVVIQHLLSEREEALKQHKTLSQELVNLRGELVTASTTCEKLEKARNELQTVYEAFVQQHQAEKTERENRLKEFYTREYEKLRDTYIEEAEKYKMQLQEQFDNLNAAHETSKLEIEASHSEKLELLKKAYEASLSEIKKGHEIEKKSLEDLLSEKQESLEKQINDLKSENDALNEKLKSEEQKRRAREKANLKNPQIMYLEQELESLKAVLEIKNEKLHQQDIKLMKMEKLVDNNTALVDKLKRFQQENEELKARMDKHMAISRQLSTEQAVLQESLEKESKVNKRLSMENEELLWKLHNGDLCSPKRSPTSSAIPLQSPRNSGSFPSPSISPR

SEQ ID NO: 4419 - protein, 423 aa, Homo sapiens
MVPHLLLLCLLPLVRATEPHEGRADEQSAEAALAVPNASHFFSWNNYTFSDWQNFVGRRRYGAESQNPTVKALLIVAYSFIIVFSLFGNVLVCHVIFKNQRMHSATSLFIVNLAVADIMITLLNTPFTLVRFVNSTWIFGKGMCHVSRFAQYCSLHVSALTLTAIAVDRHQVIMHPLKPRISITKGVIYIAVIWTMATFFSLPHAICQKLFTFKYSEDIVRSLCLPDFPEPADLFWKYLDLATFILLYILPLLIISVAYARVAKKLWLCNMIGDVTTEQYFALRRKKKKTIKMLMLVVVLFALCWFPLNCYVLLLSSKVIRTNNALYFAFHWFAMSSTCYNPFIYCWLNENFRIELKALLSMCQRPPKPQEDRQPSPVPSFRVAWTEKNDGQRAPLANNLLPTSQLQSGKTDLSSVEPIVTMS

SEQ ID NO: 4420 - protein, 461 aa, Homo sapiens
MLELRHRGSCPGPREAVSPPHREGEAAGGDHETESTSDKETDIDDRYGDLDSRTDSDIPEIPPSSDRTPEILKKALSGLSSRWKNWWIRGILTLTMISLFFLIIYMGSFMLMLLVLGIQVKCFHEIITIGYRVYHSYDLPWFRTLSWYFLLCVNYFFYGETVADYFATFVQREEQLQFLIRYHRFISFALYLAGFCMFVLSLVKKHYRLQFYMFAWTHVTLLITVTQSHLVIQNLFEGMIWFLVPISSVICNDITAYLFGFFFGRTPLIKLSPKKTWEGFIGGFFSTVVFGFIAAYVLSKYQYFVCPVEYRSDVNSFVTECEPSELFQLQTYSLPPFLKAVLRQERVSLYPFQIHSIALSTFASLIGPFGGFFASGFKRAFKIKDFANTIPGHGGIMDRFDCQYLMATFVHVYITSFIRGPNPSKVLQQLLVLQPEQQLNIYKTLKTHLIEKGILQPTLKV

SEQ ID NO: 4421 - protein, 541 aa, Homo sapiens
MTTPAGSGSGFGSVSWWGLSPALDLQAESPPVDPDSQADTVHSNPELDVLLLGSVDGRHLLRTLSRAKFWPRRRFNFFVLENNLEAVARHMLIFSLALEEPEKMGLQERSETFLEVWGNALLRPPVAAFVRAQADLLAHLVPEPDRLEEQLPWLSLRALKFRERDALEAVFRFWAGGEKGPQAFPMSRLWDSRLRHYLGSRYDARRGVSDWDLRMKLHDRGAQVIHPQEFRRWRDTGVAFELRDSSAYHVPNRTLASGRLLSYRGERVAARGYWGDIATGPFVAFGIEADDESLLRTSNGQPVKTAGEITQHNVTELLRDVAAWGRARATGGDLEEQQHAEGSPEPGTPAAPTPESFTVHFLPLNSAQTLHHKSCYNGRFQLLYVACGMVHLLIPELGACVAPGGNLIVELARYLVDVRQEQLQGFNTRVRELAQAAGFAPQTGARPSETFARFCKSQESALGNTVPAVEPGTPPLDILAQPLEASNPALEGLTQPLQGGTPHCEPCQLPSESPGSLSEVLAQPQGALAPPNCESDSKTGV

SEQ ID NO: 4422 - protein, 537 aa, Homo sapiens
MAHCVTLVQLSISCDHLIDKDIGSKSDPLCVLLQDVGGGSWAELGRTERVRNCSSPEFSKTLQLEYRFETVQKLRFGIYDIDNKTPELRDDDFLGGAECSLGQIVSSQVLTLPLMLKPGKPAGRGTITVSAQELKDNRVVTMEVEARNLDKKDFLGKSDPFLEFFRQGDGKWHLVYRSEVIKNNLNPTWKRFSVPVQHFCGGNPSTPIQVQCSDYDSDGSHDLIGTFHTSLAQLQAVPAEFECIHPEKQQKKKSYKNSGTIRVKICRVETEYSFLDYVMGGCQINFTVGVDFTGSNGDPSSPDSLHYLSPTGVNEYLMALWSVGSVVQDYDSDKLFPAFGFGAQVPPDWQVSHEFALNFNPSNPYCAGIQGIVDAYRQALPQVRLYGPTNFAPIINHVARFAAQAAHQGTASQYFMLLLLTDGAVTDVEATREAVVRASNLPMSVIIVGVGGADFEAMEQLDADGGPLHTRSGQAAARDIVQFVPYRRFQNAPREALAQTVLAEVPTQLVSYFRAQGWAPLKPLPPSAKDPAQAPQA

SEQ ID NO: 4423 - protein, 580 aa, Homo sapiens
MWRPVQLCHFHSALLHRRQKPWPSPAVFFRRNVRGLPPRFSSPTPLWRKVLSTAVVGAPLLLGARYVMAEAREKRRMRLVVDGMGRFGRSLKVGLQISLDYWWCTNVVLRGVEENSPGYLEVMSACHQRAADALVAGAISNGGLYVKLGQGLCSFNHLLPPEYTRTLRVLEDRALKRGFQEVDELFLEDFQALPHELFQEFDYQPIAAASLAQVHRAKLHDGTSVAVKVQYIDLRDRFDGDIHTLELLLRLVEVMHPSFGFSWVLQDLKGTLAQELDFENEGRNAERCARELAHFPYVVVPRVHWDKSSKRVLTADFCAGCKVNDVEAIRSQGLAVHDIAEKLIKAFAEQIFYTGFIHSDPHPGNVLVRKGPDGKAELVLLDHGLYQFLEEKDRAALCQLWRAIILRDDAAMRAHAAALGVQDYLLFAEMLMQRPVRLGQLWGSHLLSREEAAYMVDMARERFEAVMAVLRELPRPMLLVLRNINTVRAINVALGAPVDRYFLMAKRAVRGWSRLAGATYRGVYGTSLLRHAKVVWEMLKFEVALRLETLAMRLTALLARALVHLSLVPPAEELYQYLET

SEQ ID NO: 4424 - protein, 175 aa, Homo sapiens
MDIAIHHPWIRRPFFPFHSPSRLFDQFFGEHLLESDLFPTSTSLSPFYLRPPSFLRAPSWFDTGLSEMRLEKDRFSVNLDVKHFSPEELKVKVLGDVIEVHGKHEERQDEHGFISREFHRKYRIPADVDPLTITSSLSSDGVLTVNGPRKQVSGPERTIPITREEKPAVTAAPKK

SEQ ID NO: 4425 - protein, 486 aa, Homo sapiens [sequence omitted]

SEQ ID NO: 4426 - protein, 316 aa, Homo sapiens
MASRLLLNNGAKMPILGLGTWKSPPGQVTEAVKVAIDVGYRHIDCAHVYQNENEVGVAIQEKLREQVVKREELFIVSKLWCTYHEKGLVKGACQKTLSDLKLDYLDLYLIHWPTGFKPGKEFFPLDESGNVVPSDTNILDTWAAMEELVDEGLVKAIGISNFNHLQVEMILNKPGLKYKPAVNQIECHPYLTQEKLIQYCQSKGIVVTAYSPLGSPDRPWAKPEDPSLLEDPRIKAIAAKHNKTTAQVLIRFPMQRNLVVIPKSVTPERIAENFKVFDFELSSQDMTTLLSYNRNWRVCALLSCTSHKDYPFHEEF

SEQ ID NO: 4427 - protein, 361 aa, Homo sapiens
MASLLAKDAYLQSLAKKICSHSAPEQQARTRAGKTQGSETAGPPKKKRKKTQKKFRKREEKAAEHKAKSLGEKSPAASGARRPEAAKEEAAWASSSAGNPADGLATEPESVFALDVLRQRLHEKIQEARGQGSAKELSPAALEKRRRRKQERDRKKRKRKELRAKEKARKAEEATEAQEVVEATPEGACTEPREPPGLIFNKVEVSEDEPASKAQRRKEKRQRVKGNLTPLTGRNYRQLLERLQARQSRLDELRGQDEGKAQELEAKMKWTNLLYKAEGVKIRDDERLLQEALKRKEKRRAQRQRRWEKRTAGVVEKMQQRQDRRRQNLRRKKAARAERRLLRARKKGRILPQDLERAGLV

SEQ ID NO: 4428 - protein, 261 aa, Homo sapiens
MFEARLVQGSILKKVLEALKDLINEACWDISSSGVNLQSMDSSHVSLVQLTLRSEGFDTYRCDRNLAMGVNLTSMSKILKCAGNEDIITLRAEDNADTLALVFEAPNQEKVSDYEMKLMDLDVEQLGIPEQEYSCVVKMPSGEFARICRDLSHIGDAVVISCAKDGVKFSASGELGNGNIKLSQTSNVDKEEEAVTIEMNEPVQLTFALRYLNFFTKATPLSSTVTLSMSADVPLVVEYKIADMGHLKYYLAPKIEDEEGS

SEQ ID NO: 4429 - protein, 92 aa, Homo sapiens
MSELEKAMVALIDVFHQYSGREGDKHKLKKSELKELINNELSHFLEEIKEQEVVDKVMETLDNDGDGECDFQEFMAFVAMVTTACHEFFEHE

SEQ ID NO: 4430 - protein, 586 aa, Homo sapiens
MSRESDVEAQQSHGSSACSQPHGSVTQSQGSSSQSQGISSSSTSTMPNSSQSSHSSSGTLSSLETVSTQELYSIPEDQEPEDQEPEEPTPAPWARLWALQDGFANLETESGHVTQSDLELLLSSDPPASASQSAGIRGVRHHPRPVCSLKCVNDNYWFGRDKSCEYCFDEPLLKRTDKYRTYSKKHFRIFREVGPKNSYIAYIEDHSGNGTFVNTELVGKGKRRPLNNNSEIALSLSRNKVFVFFDLTVDDQSVYPKALRDEYIMSKTLGSGACGEVKLAFERKTCKKVAIKIISKRKFAIGSAREADPALNVETEIEILKKLNHPCIIKIKNFFDAEDYYIVLELMEGGELFDKVVGNKRLKEATCKLYFYQMLLAVQYLHENGIIHRDLKPENVLLSSQEEDCLIKITDFGHSKILGETSLMRTLCGTPTYLAPEVLVSVGTAGYNRAVDCWSLGVILFICLSGYPPFSEHRTQVSLKDQITSGKYNFIPEVWAEVSEKALDLVKKLLVVDPKARFTTEEALRHPWLQDEDMKRKFQDLLSEENESTALPQVLAQPSTSRKRPREGEAEGAETTKRPAVCAAVL

SEQ ID NO: 4431 - protein, 343 aa, Homo sapiens
MASAGSTARRAGSGSWHSERGEGRGARPQPTPSGSMQQANKVSLKATWTDAESKQPSQPLPDLADHLSAQATALARPRRPASLTPPRADPSPSKESDQTAIDQTAIGSYYQLFAAAVGNVEWLRFCLNQSLREIPTDDKGFTAIHFAAQWGKLACLQVLVEEYKFPVDLLTNNSQTPLHLVIHRDNTTVALPCIYYLLEKGADLNAQTCNGSTPLHLAARDGLLDCVKVLVQSGANVHAQDAMGYKPIDFCKIWNHRACARFLKDAMWKKDKKDFAREMTKMKMFKSQLTLMEHNYLIEYQGQGCSVHFPFAFSPITPETLLWQDISLLSDCGFLWRRRELSF

SEQ ID NO: 4432 - protein, 409 aa, Homo sapiens
MEESWEAAPGGQAGAELPMEPVGSLVPTLEQPQVPAKVRQPEGPESSPSPAGAVEKAAGAGLEPSSKKKPPSPRPGSPRVPPLSLGYGVCPEPPSPGPALVKLPRNGEAPGAEPAPSAWAPMELQVDVRVKPVGAAGGSSTPSPRPSTRFLKVPVPESPAFSRHADPAHQLLLRAPSQGGTWGRRSPLAAARTESGCDAEGRASPAEGSAGSPGSPTCCRCKELGLEKEDAALLPRAGLDGDEKLPRAVTLTGLPMYVKSLYWALAFMAVLLAVSGVVIVVLASRAGARCQQCPPGWVLSEEHCYYFSAEAQAWEASQAFCSAYHATLPLLSHTQDFLGRYPVSRHSWVGAWRGPQGWHWIDEAPLPPQLLPEDGEDNLDINCGALEEGTLVAANCSTPRPWVCAKGTQ

SEQ ID NO: 4433 - protein, 493 aa, Homo sapiens
MERSPDVSPGPSRSFKEELLCAVCYDPFRDAVTLRCGHNFCRGCVSRCWEVQVSPTCPVCKDRASPADLRTNHTLNNLVEKLLREEAEGARWTSYRFSRVCRLHRGQLSLFCLEDKELLCCSCQADPRHQGHRVQPVKDTAHDFRAKCRNMEHALREKAKAFWAMRRSYEAIAKHNQVEAAWLEGRIRQEFDKLREFLRVEEQAILDAMAEETRQKQLLADEKMKQLTEETEVLAHEIERLQMEMKEDDVSFLMKHKSRKRRLFCTMEPEPVQPGMLIDVCKYLGSLQYRVWKKMLASVESVPFSFDPNTAAGWLSVSDDLTSVTNHGYRVQVENPERFSSAPCLLGSRVFSQGSHAWEVALGGLQSWRVGVVRVRQDSGAEGHSHSCYHDTRSGFWYVCRTQGVEGDHCVTSDPATSPLVLAIPRRLRVELECEEGELSFYDAERHCHLYTFHARFGEVRPYFYLGGARGAGPPEPLRICPLHISVKEELDG

SEQ ID NO: 4434 - protein, 673 aa, Homo sapiens
MGGLASGGDVEPGLPVEVRGSNGAFYKGFVKDVHEDSVTIFFENNWQSERQIPFGDVRLPPPADYNKEITEGDEVEVYSRANEQEPCGWWLARVRMMKGDFYVIEYAACDATYNEIVTLERLRPVNPNPLATKGSFFKVTMAVPEDLREACSNENVHKEFKKALGANCIFLNITNSELFILSTTEAPVKRASLLGDMHFRSLRTKLLLMSRNEEATKHLETSKQLAAAFQEEFTVREDLMGLAIGTHGANIHQARKVPGVTAIELGEETCTFRIYGETPEACRQARSYLEFSEDSVQVPRNLVGKVIGKNGKVIQEIVDKSGVVRVRVEGDNDKKNPREEGMVPFIFVGTRENISNAQALLEYHLSYLQEVEQLRLERLQIDEQLRQIGLGFRPPGSGRGSGGSDKAGYSTDESSSSSLHATRTYGGSYGGRGRGRRTGGPAYGPSSDVSTASETESEKREEPNRAGPGDRDPPTRGEESRRRPTGGRGRGPPPAPRPTSRYNSSSISSVLKDPDSNPYSLLDTSEPEPPVDSEPGEPPPASARRRRSRRRRTDEDRTVMDGGLESDGPNMTENGLEDESRPQRRNRSRRRRNRGNRTDGSISGDRQPVTVADYISRAESQSRQRPPLERTKPSEDSLSGQKGDSVSKLPKGPSENGELSAPLELGSMVNGVS

SEQ ID NO: 4435 - protein, 346 aa, Homo sapiens
MAMVSEFLKQAWFIENEEQEYVQTVKSSKGGPGSAVSPYPTFNPSSDVAALHKAIMVKGVDEATIIDILTKRNNAQRQQIKAAYLQETGKPLDETLKKALTGHLEEVVLALLKTPAQFDADELRAAMKGLGTDEDTLIEILASRTNKEIRDINRVYREELKRDLAKDITSDTSGDFRNALLSLAKGDRSEDFGVNEDLADSDARALYEAGERRKGTDVNVFNTILTTRSYPQLRRVFQKYTKYSKHDMNKVLDLELKGDIEKCLTAIVKCATSKPAFFAEKLHQAMKGVGTRHKALIRIMVSRSEIDMNDIKAFYQKMYGISLCQAILDETKGDYEKILVALCGGN

SEQ ID NO: 4436 - protein, 754 aa, Homo sapiens
MNSSSRSQILLRWKSDKAQSGPYNVEKEILTSRFLRDTETCRQNFRNFPYPDLAGPRKALSQLRELCLKWLRPEIHSKEQILELLVLEQFLTILPGEVRTWVKSQYPESSEEAVTLVEDLTQILEEEAPQNSTLSQDTPEEDPRGKHAFQTGWLNDLVTKESMTFKDVAVDITQEDWELMRPVQKELYKTVTLQNYWNMVSLGLTVYRPTVIPILEEPWMVIKEILEGPSPEWETKAQACTPVEDMSKLTKEETHTIKLEDSYDYDDRLERRGKGGFWKIHTDERGFSLKSVLSQEYDPTEECLSKYDIYRNNFEKHSNLIVQFDTQLDNKTSVYNEGRATFNHVSYGIVHRKILPGEKPYKCNVCGKKFRKYPSLLKHQSTHAKEKSYECEECGKEFRHISSLIAHQRMHTGEKPYECHQCGKAFSQRAHLTIHQRIHTGEKPYKCDDCGKDFSQRAHLTIHQRTHTGEKPYKCLECGKTFSHSSSLINHQRVHTGEKPYICNECGKTFSQSTHLLQHQKIHTGKKPYKCNECWKVFSQSTYLIRHQRIHSGEKCYKCNECGKAFAHSSTLIQHQTTHTGEKSYICNICGKAFSQSANLTQHHRTHTGEKPYKCSVCGKAFSQSVHLTQHQRIHNGEKPFKCNICGKAYRQGANLTQHQRIHTGEKPYKCNECGKAFIYSSSLNQHQRTHTGERPYKCNECDKDFSQRTCLIQHQRIHTGEKPYACRICGKTFTQSTNLIQHQRVHTGAKHRN

SEQ ID NO: 4437 - protein, 213 aa, Homo sapiens
MDQEPVGGVERGEAVAASGAAAAAAFGESAGQMSNERGFENVELGVIGKKKKVPRRVIHFVSGETMEEYSTDEDEVDGLEKKDVLPTVDPTKLTWGPYLWFYMLRAATSTLSVCDFLGEKIASVLGISTPKYQYAIDEYYRMKKEEEEEEEENRMSEEAEKQYQQNKLQTDSIVQTDQPETVISSSFVNVNFEMEGDSEVIMESKQNPVSVPP

SEQ ID NO: 4438 - protein, 244 aa, Homo sapiens
MAAAAAAGEARRVLVYGGRGALGSRCVQAFRARNWWVASVDVVENEEASASIIVKMTDSFTEQADQVTAEVGKLLGEEKVDAILCVAGGWAGGNAKSKSLFKNCDLMWKQSIWTSTISSHLATKHLKEGGLLTLAGAKAALDGTPGMIGYGMAKGAVHQLCQSLAGKNSGMPPGAAAIAVLPVTLDTPMNRKSMPEADFSSWTPLEFLVETFHDWITGKNRPSSGSLIQVVTTEGRTELTPAYF

SEQ ID NO: 4439 - protein, 194 aa, Homo sapiens
MISRTPEVTCVVVDVSHEDPEVKFNWYVDGVEVHNAKTKPWEEQYNSTYHVVSVLTVVHQNWLNGKEYKCKVSNKGLQAPIEKTISKTKGQPREPQVYTLPPSQKMTKNQVTLTCLVKGFYPSDIAVEWESNGQPENNYKTTPPMLDSNGSFFLYSKLTVDKSRWQQGNVFSCSVMHEGLQNHYTQKSLSLSPG

SEQ ID NO: 4440 - protein, 264 aa, Homo sapiens
MDVCLSSAQQPGRRGEGLSSPGGWLEAEKKGAPQKDSTGGVLEESNKIEPSLHSLQKFVPTDYASYTQEHYRFAGKEIVIQESIESYGAVVWPGAMALCQYLEEHAEELNFQDAKILEIGAGPGLVSIVASILGAQVTATDLPDVLGNLQYNLLKNTLQCTAHLPEVKELVWGEDLDKNFPKSAFYYDYVLASDVVYHHYFLDKLLTTMVYLSQPGTVLLWANKFRFSTDYEFLDKFKQVFDTTLLAEYPESSVKLFKGILKWD

SEQ ID NO: 4441 - protein, 344 aa, Homo sapiens
MRVIRVGTRKSQLARIQTDSVVATLKASYPGLQFEIIAMSTTGDKILDTALSKIGEKSLFTKELEHALEKNEVDLVVHSLKDLPTVLPPGFTIGAICKRENPHDAVVFHPKFVGKTLETLPEKSVVGTSSLRRAAQLQRKFPHLEFRSIRGNLNTRLRKLDEQQEFSAIILATAGLQRMGWHNRVGQILHPEECMYAVGQGALGVEVRAKDQDILDLVGVLHDPETLLRCIAERAFLRHLEGGCSVPVAVHTAMKDGQLYLTGGVWSLDGSDSIQETMQATIHVPAQHEDGPEDDPQLVGITARNIPRGPQLAAQNLGISLANLLLSKGAKNILDVARQLNDAH

SEQ ID NO: 4442 - protein, 717 aa, Homo sapiens [sequence omitted]

SEQ ID NO: 4443 - protein, 490 aa, Homo sapiens
MFIGATFCAPRGASASRAYVPTAWKNLPATSETFPATSRVFPSTSHFQPASSNAFRGPSAASESPKSLPFALQDPYACVEALPAVPWVPYPDGNASSACKSVPAILMVAAAAPQASATAAEASKSSEPPRRPGKATRKKKHLEPKEDNCGHRLSSRDWRGPRTWGNPSHSDWEIQRAMQLLGDRESLYTPQGLNDWGCPNTSRMPRSLEGPSTSRDQEFCGDSGGSQTWMASEVPSVSRGSSAAQEDPDRESQPLSPLDERANALVQFLLVKDQAKVPVQLSEMVNVVIREYKDDSLDIINRANTKLECTFGCQLKEVDTKTHTYIIVNKMAYPQCNLLASYLERPKFSLLMVVLSLIFMKGYCIRENLLFSFLFQLGLDVQETSGLFRITKKLITSVFVRHRYLEYRQIPFTEPAEYELLWGPRAFLETNRVHILRFLAALYENQPQIWSCQYLDSLAELEYKDANAAAEESHDSDDDAHDPTSSPHPH

SEQ ID NO: 4444 - protein, 164 aa, Homo sapiens
MHRDSCPLDCKVYVGNLGNNGNKTELERAFGYYGPLRSVWVARNPPGFAFVEFEDPRDAADAVRELDGRTLCGCRVRVELSNGEKRSRNRGPPPSWGRRPRDDYRRRSPPPRRRSPRRRSFSRSRSRSLSRDRRRERSLSRERNHKPSRSFSRSRSRSRSNERK

SEQ ID NO: 4445 - protein, 620 aa, Homo sapiens
MAAATADPGAGNPQPGDSSGGGAGGGLPSPGEQELSRRLQRLYPAVNQQETPLPRSWSPKDKYNYIGLSQGNLRVHYKGHGKNHKDAASVRATHPIPAACGIYYFEVKIVSKGRDGYMGIGLSAQGVNMNRLPGWDKHSYGYHGDDGHSFCSSGTGQPYGPTFTTGDVIGCCVNLINGTCFYTKNGHSLGIAFTDLPANLYPTVGLQTPGEIVDANFGQQPFLFDIEDYMREWRAKVQGTVHCFPISARLGEWQAVLQNMVSSYLVHHGYCATATAFARMTETPIQEEQASIKNRQKIQKLVLEGRVGEAIETTQRFYPGLLEHNPNLLFMLKCRQFVEMVNGTDSEVRSLSSRSPKSQDSYPGSPSLSPRHGPSSSHMHNTGADSPSCSNGVASTKSKQNHSKYPAPSSSSSSSSSSSSSSPSSVNYSESNSTDSTKSQHHSSTSNQETSDSEMEMEAEHYPNGVLGSMSTRIVNGAYKHEDLQTDESSMDDRHPRRQLCGGNQAATERIILFGRELQALSEQLGREYGKNLAHTEMLQDAFSLLAYSDPWSCPVGQQLDPIQREPVCAALNSAILESQNLPKQPPLMLALGQASECLRLMARAGLGSCSFARVDDYLH

SEQ ID NO: 4446 - protein, 329 aa, Homo sapiens [sequence omitted]

SEQ ID NO: 4447 - protein, 624 aa, Homo sapiens
MAENGESSGPPRPSRGPAAAQGSAAAPAEPKIIKVTVKTPKEKEEFAVPENSSVQQFKEAISKRFKSQTDQLVLIFAGKILKDQDTLIQHGIHDGLTVHLVIKSQNRPQGQSTQPSNAAGTNTTSASTPRSNSTPISTNSNPFGLGSLGGLAGLSSLGLSSTNFSELQSQMQQQLMASPEMMIQIMENPFVQSMLSNPDLMRQLIMANPQMQQLIQRNPEISHLLNNPDIMRQTLEIARNPAMMQEMMRNQDLALSNLESIPGGYNALRRMYTDIQEPMLNAAQEQFGGNPFASVGSSSSSGEGTQPSRTENRDPLPNPWAPPPATQSSATTSTTTSTGSGSGNSSSNATGNTVAAANYVASIFSTPGMQSLLQQITENPQLIQNMLSAPYMRSMMQSLSQNPDLAAQMMLNSPLFTANPQLQEQMRPQLPAFLQQMQNPDTLSAMSNPRAMQALMQIQQGLQTLATEAPGLIPSFTPGVGVGVLGTAIGPVGPVTPIGPIGPIVPFTPIGPIGPIGPTGPAAPPGSTGSGGPTGPTVSSAAPSETTSPTSESGPNQQFIQQMVQALAGANAPQLPNPEVRFQQQLEQLNAMGFLNREANLQALIATGGDINAAIERLLGSQPS

SEQ ID NO: 4448 - protein, 655 aa, Homo sapiens
MAKGGEALPQGSPAPVQDPHLIKVTVKTPKDKEDFSVTDTCTIQQLKEEISQRFKAHPDQLVLIFAGKILKDPDSLAQCGVRDGLTVHLVIKRQHRAMGNECPAASVPTQGPSPGSLPQPSSIYPADGPPAFSLGLLTGLSRLGLAYRGFPDQPSSLMRQHVSVPEFVTQLIDDPFIPGLLSNTGLVRQLVLDNPHMQQLIQHNPEIGHILNNPEIMRQTLEFLRNPAMMQEMIRSQDRVLSNLESIPGGYNVLCTMYTDIMDPMLNAVQEQFGGNPFATATTDNATTTTSQPSRMENCDPLPNPWTSTHGGSGSRQGRQDGDQDAPDIRNRFPNFLGIIRLYDYLQQLHENPQSLGTYLQGTASALSQSQEPPPSVNRVPPSSPSSQEPGSGQPLPEESVAIKGRSSCPAFLRYPTENSTGQGGDQDGAGKSSTGHSTNLPDLVSGLGDSANRVPFAPLSFSPTAAIPGIPEPPWLPSPAYPRSLRPDGMNPAPQLQDEIQPQLPLLMHLQAAMANPRALQALRQIEQGLQVLATEAPRLLLWFMPCLAGTGSVAGGIESREDPLMSEDPLPNPPPEVFPALDSAELGFLSPPFLHMLQDLVSTNPQQLQPEAHFQVQLEQLRSMGFLNREANLQALIATGGDVDAAVEKLRQS

SEQ ID NO: 4449 - protein, 166 aa, Homo sapiens
MMLHSALGLCLLLVTVSSNLAIAIKKEKRPPQTLSRGWGDDITWVQTYEEGLFYAQKSKKPLMVIHHLEDCQYSQALKKVFAQNEEIQEMAQNKFIMLNLMHETTDKNLSPDGQYVPRIMFVDPSLTVRADIAGRYSNRLYTYEPRDLPLLIENMKKALRLIQSEL

SEQ ID NO: 4450 - protein, 298 aa, Homo sapiens
MGPKDSAKCLHRGPQPSHWAAGDGPTQERCGPRSLGSPVLGLDTCRAWDHVDGQILGQLRPLTEEEEEEGAGATLSRGPAFPGMGSEELRLASFYDWPLTAEVPPELLAAAGFFHTGHQDKVRCFFCYGGLQSWKRGDDPWTEHAKWFPSCQFLLRSKGRDFVHSVQETHSQLLGSWDPWEEPEDAAPVAPSVPASGYPELPTPRREVQSESAQEPGGVSPAEAQRAWWVLEPPGARDVEAQLRRLQEERTCKVCLDRAVSIVFVPCGHLVCAECAPGLQLCPICRAPVRSRVRTFLS

SEQ ID NO: 4451 - protein, 348 aa, Homo sapiens
MGHCCCKPYNCLQCLDKTNESALVKEKELSIELANIRDEVAFHTAKCEKLQKEKEELERRFEDEVKRLGWQQQAELQELEERLQLQFEAEMARLQEEHGDQLLSIRCQHQEQVEDLTASHDAALLEMENNHTVAITILQDDHDHKVQELMSTHELEKKELEENFEKLRLSLQDQVDTLTFQSQSLRDRARRFEEALRKNTEEQLEIALAPYQHLEEDMKSLKQVLEMKNQQIHEQEKKILELEKLAEKNIILEEKIQVLQQQNEDLKARIDQNTVVTRQLSEENANLQEYVEKETQEKKRLSRTNEELLWKLQTGDPTSPIKLSPTSPVYRGSSSGPSSPARVSTTPR

SEQ ID NO: 4452 - protein, 475 aa, Homo sapiens
MSRRKAGSAPRRVEPAPAANPDDEMEMQDLVIELKPEPDAQPQQAPRLGPFSPKEVSSAGRFGGEPHHSPGPMPAGAALLALGPRNPWTLWTPLTPNYPDRQPWTDKHPDLLTCGRCLQTFPLEAITAFMDHKKLGCQLFRGPSRGQGSEREELKALSCLRCGKQFTVAWKLLRHAQWDHGLSIYQTESEAPEAPLLGLAEVAAAVSAVVGPAAEAKSPRASGSGLTRRSPTCPVCKKTLSSFSNLKVHMRSHTGERPYACDQCPYACAQSSKLNRHKKTHRQVPPQSPLMADTSQEQASAAPPEPAVHAAAPTSTLPCSGGEGAGAAATAGVQEPGAPGSGAQAGPGGDTWGAITTEQRTDPANSQKASPKKMPKSGGKSRGPGGSCEFCGKHFTNSSNLTVHRRSHTGERPYTCEFCNYACAQSSKLNRHRRMHGMTPGSTRFECPHCHVPFGLRATLDKHLRQKHPEAAGEA

SEQ ID NO: 4453 - protein, 875 aa, Homo sapiens
MERAGPSFGQQRQQQQPQQQKQQQRDQDSVEAWLDGHWDFTFSYFVRKATREMVNAWFAERVHTIPVCKEGIRGHTESCSCPLQQSPRADNSVPGTPTRKISASEFDRPLRPIVVKDSEGTVSFLSDSEKKEQMPLTPPRFDHDEGDQCSRLLELVKDISSHLDVTALCHKIFLHIHGLISADRYSLFLVCEDSSNDKFLISRLFDVAEGSTLEEVSNNCIRLEWNKGIVGHVAALGEPLNIKDAYEDPRFNAEVDQITGYKTQSILCMPIKNHREEVVGVAQAINKKSGNGGTFTEKDEKDFAAYLAFCGIVLHNAQLYETSLLENKRNQVLLDLASLIFEEQQSLEVILKKIAATIISFMQVQKCTIFIVDEDCSDSFSSVFHMECEELEKSSDTLTREHDANKINYMYAQYVKNTMEPLNIPDVSKDKRFPWTTENTGNVNQQCIRSLLCTPIKNGKKNKVIGVCQLVNKMEENTGKVKPFNRNDEQFLEAFVIFCGLGIQNTQMYEAVERAMAKQMVTLEVLSYHASAAEEETRELQSLAAAVVPSAQTLKITDFSFSDFELSDLETALCTIRMFTDLNLVQNFRMKHEVLCRWILSVKKNYRKNVAYHNWRHAFNTAQCMFAALKAGKIQNKLTDLEILALLIAALSHDLDHRGVNNSYIQRSEHPLAQLYCHSIMEHHHFDQCLMILNSPGNQILSGLSIEEYKTTLKIIKQAILATDLALYIKRRGEFFELIRKNQFNLEDPHQKELFLAMLMTACDLSAITKPWPIQQRIAELVATEFFDQGDRERKELNIEPTDLMNREKKNKIPSMQVGFIDAICLQLYEALTHVSEDCFPLLDGCRKNRQKWQALAEQQEKMLINGESGQAKRN

SEQ ID NO: 4454 - protein, 419 aa, Homo sapiens [sequence omitted]

SEQ ID NO: 4455 - protein, 233 aa, Homo sapiens
MSQSNRELVVDFLSYKLSQKGYSWSQFSDVEENRTEAPEGTESEMETPSAINGNPSWHLADSPAVNGATGHSSSLDAREVIPMAAVKQALREAGDEFELRYRRAFSDLTSQLHITPGTAYQSFEQVVNELFRDGVNWGRIVAFFSFGGALCVESVDKEMQVLVSRIAAWMATYLNDHLEPWIQENGGWDTFVELYGNNAAAESRKGQERFNRWFLTGMTVAGVVLLGSLFSRK

SEQ ID NO: 4456 - protein, 273 aa, Homo sapiens
MGRSRSRSSSRSKHTKSSKHNKKRSRSRSRSRDKERVRKRSKSRESKRNRRRESRSRSRSTNTAVSRRERDRERASSPPDRIDIFGRTVSKRSSLDEKQKREEEEKKAEFERQRKIRQQEIEEKLIEEETARRVEELVAKRVEEELEKRKDEIEREVLRRVEEAKRIMEKQLLEELERQRQAELAAQKAREEEERAKREELERILEENNRKIAEAQAKLAEEQLRIVEEQRKIHEERMKLEQERQRQQKEEQKIILGKGKSRPKLSFSLKTQD

SEQ ID NO: 4457 - protein, 490 aa, Homo sapiens [sequence omitted]

SEQ ID NO: 4458 - protein, 377 aa, Homo sapiens
MVLESTMVCVDNSEYMRNGDFLPTRLQAQQDAVNIVCHSKTRSNPENNVGLITLANDCEVLTTLTPDTGRILSKLHTVQPKGKITFCTGIRVAHLALKHRQGKNHKMRIIAFVGSPVEDNEKDLVKLAKRLKKEKVNVDIINFGEEEVNTEKLTAFVNTLNGKDGTGSHLVTVPPGPSLADALISSPILAGEGGAMLGLGASDFEFGVDPSADPELALALRVSMEEQRQRQEEEARRAAAASAAEAGIATTGTEDSDDALLKMTISQQEFGRTGLPDLSSMTEEEQIAYAMQMSLQGAEFGQAESADIDASSAMDTSEPAKEEDDYDVMQDPEFLQSVLENLPGVDPNNEAIRNAMGSLASQATKDGKKDKKEEDKK

SEQ ID NO: 4459 - protein, 276 aa, Homo sapiens
MGNSMKSTPAPAERPLPNPEGLDSDFLAVLSDYPSPDISPPIFRRGEKLRVISDEGGWWKAISLSTGRESYIPGICVARVYHGWLFEGLGRDKAEELLQLPDTKVGSFMIRESETKKGFYSLSVRHRQVKHYRIFRLPNNWYYISPRLTFQCLEDLVNHYSEVADGLCCVLTTPCLTQSTAAPAVRASSSPVTLRQKTVDWRRVSRLQEDPEGTENPLGVDESLFSYGLRESIASYLSLTSEDNTSFDRKKKSISLMYGGSKRKSSFFSSPPYFED

SEQ ID NO: 4460 - protein, 227 aa, Homo sapiens
MSVVPPNRSQTGWPRGVTQFGNKYIQQTKPLTLERTINLYPLTNYTFGTKEPLYEKDSSVAARFQRMREEFDKIGMRRTVEGVLIVHEHRLPHVLLLQLGTTFFKLPGGELNPGEDEVEGLKRLMTEILGRQDGVLQDWVIDDCIGNWWRPNFEPPQYPYIPAHITKPKEHKKLFLVQLQEKALFAVPKNYKLVAAPLFELYDNAPGYGPIISSLPQLLSRFNFIYN

SEQ ID NO: 4461 - protein, 576 aa, Homo sapiens
MDDLKYGVYPLKEASGCPGAERNLLVYSYFEKETLTFRDVAIEFSLEEWECLNPAQQNLYMNVMLENYKNLVFLGVAVSKQDPVTCLEQEKEPWNMKRHEMVDEPPAMCSYFTKDLWPEQDIKDSFQQVILRRYGKCEHENLQLRKGSASVDEYKVHKEGYNELNQCLTTTQSKIFPCDKYVKVFHKFLNANRHKTRRTGKKPFKCKKCGKSFCMLLHLSQHKRIHIRENSYQCEECGKAFKWFSTLTRHKRIHTGEKPFKCEECGKAFKQSSTLTTHKIIHTGEKPYRCEECGKAFNRSSHLTTHKIIHTGEKPYKCEECGKAFNQSSTLSTHKFIHAGEKPYKCEECDKAFNRFSYLTKHKIIHTGEKSYKCEECGKGFNWSSTLTKHKRIHTGEKPYKCEVCGKAFNESSNLTTHKMIHTGEKPYKCEECGKAFNRSPQLTAHKIIHTGEKPYKCEECGKAFSQSSILTTHKRIHTGEKPYKCEECGKAFNRSSNLTKHKIIHTGEKSYKCEECGKAFNQSSTLTKHRKIHTRQKPYNCEECDNTFNQSSNLIKQNNSYWRETLQMSRMWESL

SEQ ID NO: 4462 - protein, 642 aa, Homo sapiens
MEEERKTAELQKNRIQDSVVFEDVAVDFTQEEWALLDLAQRNLYRDVMLENFQNLASLGYPLHTPHLISQWEQEEDLQTVKRELIQGIFMGEHREGFETQLKTNESVASQDICGEKISNEQKIVRFKRNDSWFSSLHENQESCGIDYQNKSHERHLRNHMVENIYECYEENQDGQTFSQVPNLDSLKRNTEVKSCECHECGKAFVDHSSLKSHIRSHTGSKPYQCKECGKAFHFLACFKKHMKTPTEEKPYECKECTKAFSCSSFFRAHMKIHIGKTNYECKECGKGFSCSSSLTEHKRIHSGDKPYECKECGKAFSCSSSLSKHKRIHSGDKPYECKECGKAFSSSSHLIIHIRIHTGEKPYECKECGKAFSESSKLTVHGRTHTGEKPYKCKECGKAYNCPSSLSIHMRKHTGEKPYECLECGKAFYLPTSLNTHVKNQSREKPYECKECGKAFSCPSSFRAHVRDHTGKIQYECKECGKTFSRSSSLTEHLRTHSGEKPYECKECGKAFISSSHLTVHIRTHTGEKPYECKKCGKAFIYPSALRIHMRTHTGEKPYECKECGKAFRHSSYLTVHARMHTGEKPFECLECGKAFSCPSSFRRHVRSHTGEKPYECKECGKAFVCPAYFRRHVKTHTRENI

SEQ ID NO: 4463 - protein, 111 aa, Homo sapiens
MSELLRARSQSSERGNDQESSQPVGSVIVQEPTEEKRQEEEPPTDNQGIAPSGEIENQAVPAFQGPDMEAFQQELALLKIEDEPGDGPDVREGIMPTFDLTKVLEAGDAQP

SEQ ID NO: 4464 - protein, 96 aa, Homo sapiens
MCHTSCSPACQPTCCIHSPCQASCYVPVSCQSSVCMPVSCTRIVCVAPSCQPSVCVPVSCRPIIYVTPSCQSSGCCQPPCTTALCRPISCSTPSCC

SEQ ID NO: 4465 - protein, 434 aa, Homo sapiens
MSIEKIWAREILDSRGNPTVEVDLYTAKGLFRAAVPSGASTGIYEALELRDGDKQRYLGKGVLKAVDHINSTIAPALISSGLSVVEQEKLDNLMLELDGTENKSKFGANAILGVSLAVCKAGAAERELPLYRHIAQLAGNSDLILPVPAFNVINGGSHAGNKLAMQEFMILPVGAESFRDAMRLGAEVYHTLKGVIKDKYGKDATNVGDEGGFAPNILENSEALELVKEAIDKAGYTEKIVIGMDVAASEFYRDGKYDLDFKSPTDPSRYITGDQLGALYQDFVRDYPVVSIEDPFDQDDWAAWSKFTANVGIQIVGDDLTVTNPKRIERAVEEKACNCLLLKVNQIGSVTEAIQACKLAQENGWGVMVSHRSGETEDTFIADLVVGLCTGQIKTGAPCRSERLAKYNQLMRIEEELGDEARFAGHNFRNPSVL

SEQ ID NO: 4466 - protein, 251 aa, Homo sapiens
MEPGEELEEEGSPGGREDGFTAEHLAAEAMAADMDPWLVFDARTTPATELDAWLAKYPPSQVTRYGDPGSPNSEPVGWIAVYGQGYSPNSGDVQGLQAAWEALQTSGRPITPGTLRQLAITHHVLSGKWLMHLAPGFKLDHAWAGIARAVVEGRLQVAKVSPRAKEGGRQVICVYTDDFTDRLGVLEADSAIRAAGIKCLLTYKPDVYTYLGIYRANRWHLCPTLYESRFQLGGSARGSRVLDRANNVELT

SEQ ID NO: 4467 - protein, 900 aa, Homo sapiens
MRLFVSDGVPGCLPVLAAAGRARGRAEVLISTVGPEDCVVPFLTRPKVPVLQLDSGNYLFSTSAICRYFFLLSGWEQDDLTNQWLEWEATELQPALSAALYYLVVQGKKGEDVLGSVRRALTHIDHSLSRQNCPFLAGETESLADIVLWGALYPLLQDPAYLPEELSALHSWFQTLSTQEPCQRAAETVLKQQGVLALRPYLQKQPQPSPAEGRAVTNEPEEEELATLSEEEIAMAVTAWEKGLESLPPLRPQQNPVLPVAGERNVLITSALPYVNNVPHLGNIIGCVLSADVFARYSRLRQWNTLYLCGTDEYGTATETKALEEGLTPQEICDKYHIIHADIYRWFNISFDIFGRTTTPQQTKITQDIFQQLLKRGFVLQDTVEQLRCEHCARFLADRFVEGVCPFCGYEEARGDQCDKCGKLINAVELKKPQCKVCRSCPVVQSSQHLFLDLPKLEKRLEEWLGRTLPGSDWTPNAQFITRSWLRDGLKPRCITRDLKWGTPVPLEGFEDKVFYVWFDATIGYLSITANYTDQWERWWKNPEQVDLYQFMAKDNVPFHSLVFPCSALGAEDNYTLVSHLIATEYLNYEDGKFSKSRGVGVFGDMAQDTGIPADIWRFYLLYIRPEGQDSAFSWTDLLLKNNSELLNNLGNFINRAGMFVSKFFGGYVPEMVLTPDDQRLLAHVTLELQHYHQLLEKVRIRDALRSILTISRHGNQYIQVNEPWKRIKGSEADRQRAGTVTGLAVNIAALLSVMLQPYMPTVSATIQAQLQLPPPACSILLTNFLCTLPAGHQIGTVSPLFQKLENDQIESLRQRFGGGQAKTSPKPAVVETVTTAKPQQIQALMDEVTKQGNIVRELKAQKADKNEVAAEVAKLLDLKKQLAVAEGKPPEAPKGKKKK

SEQ ID NO: 4468 - protein, 376 aa, Homo sapiens
MDVLAEANGTFALNLLKTLGKDNSKNVFFSPMSMSCALAMVYMGAKGNTAAQMAQILSFNKSGGGGDIHQGFQSLLTEVNKTGTQYLLRVANRLFGEKSCDFLSSFRDSCQKFYQAEMEELDFISAVEKSRKHINTWVAEKTEGKIAELLSPGSVDPLTRLVLVNAVYFRGNWDEQFDKENTEERLFKVSKNEEKPVQMMFKQSTFKKTYIGEIFTQILVLPYVGKELNMIIMLPDETTDLRTVEKELTYEKFVEWTRLDMMDEEEVEVSLPRFKLEESYDMESVLRNLGMTDAFELGKADFSGMSQTDLSLSKVVHKSFVEVNEEGTEAAAATAAIMMMRCARFVPRFCADHPFLFFIQHSKTNGILFCGRFSSP

SEQ ID NO: 4469 - protein, 273 aa, Homo sapiens
MEAAPSRFMFLLFLLTCELAAEVAAEVEKSSDGPGAAQEPTWLTDVPAAMEFIAATEVAVIGFFQDLEIPAVPILHSMVQKFPGVSFGISTDSEVLTHYNITGNTICLFRLVDNEQLNLEDEDIESIDATKLSRFIEINSLHMVTEYNPVTVIGLFNSVIQIHLLLIMNKASPEYEENMHRYQKAAKLFQGKILFILVDSGMKENGKVISFFKLKESQLPALAIYQTLDDEWDTLPTAEVSVEHVQNFCDGFLSGKLLKENRESEGKTPKVEL

SEQ ID NO: 4470 - protein, 99 aa, Homo sapiens
MEPEQMLEGQTQVAENPHSEYGLTDNVERIVENEKINAEKSSKQKVDLQSLPTRAYLDQTVVPILLQGLAVLAKERPPNPIEFLASYLLKNKAQFEDRN

SEQ ID NO: 4471 - protein, 230 aa, Homo sapiens
MPLPDTMFCAQQIHIPPELPDILKQFTKAAIRTQPADVLRWSAGYFSALSRGDPLPVKDRMEMPTATQKTDTGLTQGLLKVLHKQCHHKRYVELTDLEQKWKNLCLPKEKFKALLQLDPCENKIKWINFLALGCSMLGGSLNTALKHLCEILTDDREGGPARIPFKTFSYVYRYLARLDSDVSPLETESYLASLKENIDARKNGMIGLSDFFFPKRKLLESIENSEDVGH

SEQ ID NO: 4472 - protein, 378 aa, Homo sapiens
MARCGEGSAAPMVLLGSAGVCSKGLQRKGPCERRRLKATVSEQLSQDLLRLLREEFHTDVTFSVGCTLFKAHKAVLLARVPDFYFHTIGQTSNSLTNQEPIAVENVEALEFRTFLQIIYSSNRNIKNYEEEILRKKIMEIGISQKQLDISFPKCENSSDCSLQKHEIPEDISDRDDDFISNDNYDLEPASELGEDLLKLYVKPGCPDIDIFVDGKRFKAHRAILSARSSYFAAMLSGCWAESSQEYVTLQGISHVELNVMMHFIYGGTLDIPDKTNVGQILNMADMYGLEGLKEVAIYILRRDYCNFFQKPVPRTLTSILECLIIAHSVGVESLFADCMKWIVKHFARFWSERSFANIPPEIQKSCLNMLIQSLVNIT

SEQ ID NO: 4473 - protein, 348 aa, Homo sapiens
MAVAQQLRAESDFEQLPDDVAISANIADIEEKRGFTSHFVFVIEVKTKGGSKYLIYRRYRQFHALQSKLEERFGPDSKSSALACTLPTLPAKVYVGVKQEIAEMRIPALNAYMKSLLSLPVWVLMDEDVRIFFYQSPYDSEQVPQALRRLRPRTRKVKSVSPQGNSVDRMAAPRAEALFDFTGNSKLELNFKAGDVIFLLSRINKDWLEGTVRGATGIFPLSFVKILKDFPEEDDPTNWLRCYYYEDTISTIKSVAWEGGACPAFLPSLRPPPLTSPSHGSLSHSKAPSGSQMSHNAVTSHQRPGWPGQPHSPFPHPTPHFQPDASLLQPVTPLGTSRWRKISAALPY

SEQ ID NO: 4474 - protein, 519 aa, Homo sapiens
MPFNGEKQCVGEDQPSDSDSSRFSESMASLSDYECSRQSFASDSSSKSSSPASTSPPRVVTFDEVMATARNLSNLTLAHEIAVNENFQLKQEALPEKSLAGRVKHIVHQAFWDVLDSELNADPPEFEHAIKLFEEIREILLSFLTPGGNRLRNQICEVLDTDLIRQQAEHSAVDIQGLANYVISTMGKLCAPVRDNDIRELKATGNIVEVLRQIFHVLDLMQMDMANFTIMSLRPHLQRQLVEYERTKFQEILEETPSALDQTTEWIKESVNEELFSLSESALTPGAENTSKPSLSPTLVLNNSYLKLLQWDYQKKELPETLMTDGARLQELTEKLNQLKIIACLSLITNNMVGAITGGLPELASRLTRISAVLLEGMNKETFNLKEVLNSIGIQTCVEVNKTLMERGLPTLNAEIQANLIGQFSSIEEEDNPIWSLIDKRIKLYMRRLLCLPSPQKCMPPMPGGLAVIQQELEALGSQYANIVNLNKQVYGPFYANILRKLLFNEEAMGKVDASPPTN

SEQ ID NO: 4475 - protein, 199 aa, Homo sapiens
MSLLNPVLLPPKVKAYLSQGERFIKWDDETTVASPVILRVDPKGYYLYWTYQSKEMEFLDITSIRDTRFGKFAKMPKSQKLRDVFNMDFPDNSFLLKTLTVVSGPDMVDLTFHNFVSYKENVGKAWAEDVLALVKHPLTANASRSTFLDKILVKLKMQLNSEGKIPVKNFFQMFPADRKRVEAALSACHLPKGKPGGAR

SEQ ID NO: 4476 - protein, 327 aa, Homo sapiens
MPGPTQTLSPNGENNNDIIQDNNGTIIPFRKHTVRGERSYSWGMAVNVYSTSITQETMSRHDIIAWVNDIVSLNYTKVEQLCSGAAYCQFMDMLFPGCISLKKVKFQAKLEHEYIHNFKLLQASFKRMNVDKVIPVEKLVKGRFQDNLDFIQWFKKFYDANYDGKEYDPVEARQGQDAIPPPDPGEQIFNLPKKSHHANSPTAGAAKSSPAAKPGSTPSRPSSAKRASSSGSASKSDKDLETQVIQLNEQVHSLKLALEGVEKERDFYFGKLREIELLCQEHGQENDDLVQRLMDILYASEEHEGHTEEPEAEEQAHEQQPPQQEEY

SEQ ID NO: 4477 - protein, 631 aa, Homo sapiens
MSHWAPEWKRAEANPRDLGASWDVRGSRGSGWSGPFGHQGPRAAGSREPPLCFKIKNNMVGVVIGYSGSKIKDLQHSTNTKIQIINGESEAKVRIFGNREMKAKAKAAIETLIRKQESYNSESSVDNAASQTPIGRNLGRNDIVGEAEPLSNWDRIRAAVVECEKRKWADLPPVKKNFYIESKATSCMSEMQVINWRKENFNITCDDLKSGEKRLIPKPTCRFKDAFQQYPDLLKSIIRVGILKPTPIQSQAWPIILQGIDLIVVAQTGTGKTLSYLMPGFIHLDSQPISREQRNGPGMLVLTPTRELALHVEAECSKYSYKGLKSICIYGGRNRNGQIEDISKGVDIIIATPGRLNDLQMNNSVNLRSITYLVIDEADKMLDMEFEPQIRKILLDVRPDRQTVMTSATWPDTVRQLALSYLKDPMIVYVGNLNLVAVNTVKQNIIVTTEKEKRALTQEFVENMSPNDKVIMFVSQKHIADDLSSDFNIQGISAESLHGNSEQSDQERAVEDFKSGNIKILITTDIVSRGLDLNDVTHVYNYDFPRNIDVYVHRVGYIGRTGKTGTSVTLITQRDSKMAGELIKILDRANQSVPEDLVVMAEQYKLNQQKRHRETRSREPGQRRKEFYFLS

SEQ ID NO: 4478 - protein, 636 aa, Homo sapiens
MRGGRGAPFWLWPLPKLALLPLLWVLFQRTRPQGSAGPLQCYGVGPLGDLNCSWEPLGDLGAPSELHLQSQKYRSNKTQTVAVAAGRSWVAIPREQLTMSDKLLVWGTKAGQPLWPPVFVNLETQMKPNAPRLGPDVDFSEDDPLEATVHWAPPTWPSHKVLICQFHYRRCQEAAWTLLEPELKTIPLTPVEIQDLELATGYKVYGRCRMEKEEDLWGEWSPILSFQTPPSAPKDVWVSGNLCGTPGGEEPLLLWKAPGPCVQVSYKVWFWVGGRELSPEGITCCCSLIPSGAEWARVSAVNATSWEPLTNLSLVCLDSASAPRSVAVSSIAGSTELLVTWQPGPGEPLEHVVDWARDGDPLEKLNWVRLPPGNLSALLPGNFTVGVPYRITVTAVSASGLASASSVWGFREELAPLVGPTLWRLQDAPPGTPAIAWGEVPRHQLRGHLTHYTLCAQSGTSPSVCMNVSGNTQSVTLPDLPWGPCELWVTASTIAGQGPPGPILRLHLPDNTLRWKVLPGILFLWGLFLLGCGLSLATSGRCYHLRHKVLPRWVWEKVPDPANSSSGQPHMEQVPEAQPLGDLPILEVEEMEPPPVMESSQPAQATAPLDSGYEKHFLPTPEELGLLGPPRPQVLA

SEQ ID NO: 4479 - protein, 369 aa, Homo sapiens
MEGSLEREAPAGALAAVLKHSSTLPPESTQVRGYDFNRGVNYRALLEAFGTTGFQATNFGRAVQQVNAMIEKKLEPLSQDEDQHADLTQSRRPLTSCTIFLGYTSNLISSGIRETIRYLVQHNMVDVLVTTAGGVEEDLIKCLAPTYLGEFSLRGKELRENGINRIGNLLVPNENYCKFEDWLMPILDQMVMEQNTEGVKWTPSKMIARLGKEINNPESVYYWAQKNHIPVFSPALTDGSLGDMIFFHSYKNPGLVLDIVEDLRLINTQAIFAKCTGMIILGGGVVKHHIANANLMRNGADYAVYINTAQEFDGSDSGARPDEAVSWGKIRVDAQPVKVYADASLVFPLLVAETFAQKMDAFMHEKNED

SEQ ID NO: 4480 - protein, 680 aa, Homo sapiens
MGKSRTKRFKRPQFSPTGDCQAEAAAAANGTGGEEDDGPAAELLEKLQHPSAEVRECACAGLARLVQQRPALPGLARRDAVRRLGPLLLDPSLAVRETAAGALRNLSACGGFEVCDDMVTKDIMTPLVALLKECSAGLDSNEMSLQEKKDQNRNSIENIANETVNVLWNICECSSRAVSIFNKEGCLEIVLKYLSRFPTNVDLAISVAYCLQTVTEDNPELLKSFSATALNMLESALLSPVSSMESLLLKTLVAGTIWNLKDIIPCKSQAEIINALLKILSEVLGMDAGEMVIQMKEAETQRLKTAAEAEEILENTNGDDLIEDDEMEGISHKRRVRRKTFVSDLLPPTDKELRETIALLTAQQTALEIIVNMCCNEDPSDDEWEELSSSDESDAFMENSFSECGGQLFSPLCLSHEVHTALTNYLIPKKIFEKTAFPNSIAVDLCSRNPTWKPLIRKMNTIQCRALFCLQSLVSLLDVEHLGGAAALQTLAQHLSQLLFSQPDFAKHVDFLEAISSALRALLQTMASKNISQCMTPDQLMTLCKAGIHSSNVGVRVNVVSILGITGSVLAKEDGTLETLKNIGCFLLEVTTKDPSLVVAGEALDALFDVFADGKEAERASIQIKLLSALKEFQPVFKMKIRKEGRGNYSTDQLCVLDNVKMNLRRFIAYQETVEKRLTS

SEQ ID NO: 4481 - protein, 731 aa, Homo sapiens [sequence omitted]

SEQ ID NO: 4482 - protein, 40 aa, Homo sapiens
MGLTKQYLRYVASAVFGVIGSQKGLASQASSSFVFFATEF

SEQ ID NO: 4483 - protein, 925 aa, Homo sapiens
MTTEQRRSLQAFQDYIRKTLDPTYILSYMAPWFREEEVQYIQAEKNNKGPMEAATLFLKFLLELQEEGWFRGFLDALDHAGYSGLYEAIESWDFKKIEKLEEYRLLLKRLQPEFKTRIIPTDIISDLSECLINQECEEILQICSTKGMMAGAEKLVECLLRSDKENWPKTLKLALEKERNKFSELWIVEKGIKDVETEDLEDKMETSDIQIFYQEDPECQNLSENSCPPSEVSDTNLYSPFKPRNYQLELALPAMKGKNTIICAPTGCGKTFVSLLICEHHLKKFPQGQKGKVVFFANQIPVYEQQKSVFSKYFERHGYRVTGISGATAENVPVEQIVENNDIIILTPQILVNNLKKGTIPSLSIFTLMIFDECHNTSKQHPYNMIMFNYLDQKLGGSSGPLPQVIGLTASVGVGDAKNTDEALDYICKLCASLDASVIATVKHNLEELEQVVYKPQKFFRKVESRISDKFKYIIAQLMRDTESLAKRICKDLENLSQIQNREFGTQKYEQWIVTVQKACMVFQMPDKDEESRICKALFLYTSHLRKYNDALIISEHARMKDALDYLKDFFSNVRAAGFDEIEQDLTQRFEEKLQELESVSRDPSNENPKLEDLCFILQEEYHLNPETITILFVKTRALVDALKNWIEGNPKLSFLKPGILTGRGKTNQNTGMTLPAQKCILDAFKASGDHNILIATSVADEGIDIAQCNLVILYEYVGNVIKMIQTRGRGRARGSKCFLLTSNAGVIEKEQINMYKEKMMNDSILRLQTWDEAVFREKILHIQTHEKFIRDSQEKPKPVPDKENKKLLCRKCKALACYTADVRVIEECHYTVLGDAFKECFVSRPHPKPKQFSSFEKRAKIFCARQNCSHDWGIHVKYKTFEIPVIKIESFVVEDIATGVQTLYSKWKDFHFEKIPFDPAEMSK

SEQ ID NO: 4484 - protein, 303 aa, Homo sapiens
MDPEVTLLLQCPGGGLPQEQIQAELSPAHDRRPLPGGDEAITAIWETRLKAQPWLFDAPKFRLHSATLAPIGSRGPQLLLRLGLTSYRDFLGTNWSSSAAWLRQQGATDWGDTQAYLADPLGVGAALATADDFLVFLRRSRQVAEAPGLVDVPGGHPEPQALCPGGSPQHQDLAGQLVVHELFSSVLQEICDEVNLPLLTLSQPLLLGIARNETSAGRASAEFYVQCSLTSEQVRKHYLSGGPEAHESTGIFFVETQNVRRLPETEMWAELCPSAKGAIILYNRVQGSPTGAALGSPALLPPL

SEQ ID NO: 4485 - protein, 217 aa, Homo sapiens
MAYPGYGGGFGNFSIQVPGMQMGQPVPETGPAILLDGYSGPAYSDTYSSAGDSVYTYFSAVAGQDGEVDAEELQRCLTQSGINGTYSPFSLETCRIMIAMLDRDHTGKMGFNAFKELWAALNAWKENFMTVDQDGSGTVEHHELRQAIGLMGYRLSPQTLTTIVKRYSKNGRIFFDDYVACCVKLRALTDFFRKRDHLQQGSANFIYDDFLQGTMAI

SEQ ID NO: 4486 - protein, 223 aa, Homo sapiens
MAGNKGRGRAAYTFNIEAVGFSKGEKLPDVVLKPPPLFPDTDYKPVPLKTGEGEEYMLALKQELRETMKRMPYFIETPEERQDIERYSKRYMKVYKEEWIPDWRRLPREMMPRNKCKKAGPKPKKAKDAGKGTPLTNTEDVLKKMEELEKRGDGEKSDEENEEKEGSKEKSKEGDDDDDDDAAEQEEYDEEEQEEENDYINSYFEDGDDFGADSDDNMDEATY

SEQ ID NO: 4487 - protein, 522 aa, Homo sapiens
MASGGGGCSASERLPPPFPGLEPESEGAAGGSEPEAGDSDTEGEDIFTGAAVVSKHQSPKITTSLLPINNGSKENGIHEEQDQEPQDLFADATVELSLDSTQNNQKKVLAKTLISLPPQEATNSSKPQPTYEELEEEEQEDQFDLTVGITDPEKIGDGMNAYVAYKVTTQTSLPLFRSKQFAVKRRFSDFLGLYEKLSEKHSQNGFIVPPPPEKSLIGMTKVKVGKEDSSSAEFLEKRRAALERYLQRIVNHPTMLQDPDVREFLEKEELPRAVGTQTLSGAGLLKMFNKATDAVSKMTIKMNESDIWFEEKLQEVECEEQRLRKLHAVVETLVNHRKELALNTAQFAKSLAMLGSSEDNTALSRALSQLAEVEEKIEQLHQEQANNDFFLLAELLSDYIRLLAIVRAAFDQRMKTWQRWQDAQATLQKKREAEARLLWANKPDKLQQAKDEILEWESRVTQYERDFERISTVVRKEVIRFEKEKSKDFKNHVIKYLETLLYSQQQLAKYWEAFLPEAKAIS

SEQ ID NO: 4488 - protein, 154 aa, Homo sapiens [sequence omitted]

SEQ ID NO: 4489 - protein, 534 aa, Homo sapiens
MKQEGSARRRGADKAKPPPGGGEQEPPPPPAPQDVEMKEEAATGGGSTGEADGKTAAAAAEHSQRELDTVTLEDIKEHVKQLEKAVSGKEPRFVLRALRMLPSTSRRLNHYVLYKAVQGFFTSNNATRDFLLPFLEEPMDTEADLQFRPRTGKAASTPLLPEVEAYLQLLVVIFMMNSKRYKEAQKISDDLMQKISTQNRRALDLVAAKCYYYHARVYEFLDKLDVVRSFLHARLRTATLRHDADGQATLLNLLLRNYLHYSLYDQAEKLVSKSVFPEQANNNEWARYLYYTGRIKAIQLEYSEARRTMTNALRKAPQHTAVGFKQTVHKLLIVVELLLGEIPDRLQFRQPSLKRSLMPYFLLTQAVRTGNLAKFNQVLDQFGEKFQADGTYTLIIRLRHNVIKTGVRMISLSYSRISLADIAQKLQLDSPEDAEFIVAKAIRDGVIEASINHEKGYVQSKEMIDIYSTREPQLAFHQRISFCLDIHNMSVKAMRFPPKSYNKDLESAEERREREQQDLEFAKEMAEDDDDSFP

SEQ ID NO: 4490 - protein, 303 aa, Homo sapiens
MSSARFDSSDRSAWYMGPVSRQEAQTRLQGQRHGMFLVRDSSTCPGDYVLSVSENSRVSHYIINSLPNRRFKIGDQEFDHLPALLEFYKIHYLDTTTLIEPAPRYPSPPMGSVSAPNLPTAEDNLEYVRTLYDFPGNDAEDLPFKKGEILVIIEKPEEQWWSARNKDGRVGMIPVPYVEKLVRSSPHGKHGNRNSNSYGIPEPAHAYAQPQTTTPLPAVSGSPGAAITPLPSTQNGPVFAKAIQKRVPCAYDKTALALEVGDIVKVTRMNINGQWEGEVNGRKGLFPFTHVKIFDPQNPDENE

SEQ ID NO: 4491 - protein, 296 aa, Homo sapiens
MDGDGDPESVGQPEEASPEEQPEEASAEEERPEDQQEEEAAAAAAYLDELPEPLLLRVLAALPAAELVQACRLVCLRWKELVDGAPLWLLKCQQEGLVPEGGVEEERDHWQQFYFLSKRRRNLLRNPCGEEDLEGWCDVEHGGDGWRVEELPGDSGVEFTHDESVKKYFASSFEWCRKAQVIDLQAEGYWEELLDTTQPAIVVKDWYSGRSDAGCLYELTVKLLSEHENVLAEFSSGQVAVPQDSDGGGWMEISHTFTDYGPGVRFVRFEHGGQDSVYWKGWFGARVTNSSVWVEP

SEQ ID NO: 4492 - protein, 451 aa, Homo sapiens
MPREIITLQLGQCGNQIGFEFWKQLCAEHGISPEGIVEEFATEGTDRKDVFFYQADDEHYIPRAVLLDLEPRVIHSILNSPYAKLYNPENIYLSEHGGGAGNNWASGFSQGEKIHEDIFDIIDREADGSDSLEGFVLCHSIAGGTGSGLGSYLLERLNDRYPKKLVQTYSVFPNQDEMSDVVVQPYNSLLTLKRLTQNADCVVVLDNTALNRIATDRLHIQNPSFSQINQLVSTIMSASTTTLRYPGYMNNDLIGLIASLIPTPRLHFLMTGYTPLTTDQSVASVRKTTVLDVMRRLLQPKNVMVSTGRDRQTNHCYIAILNIIQGEVDPTQVHKSLQRIRERKLANFIPWGPASIQVALSRKSPYLPSAHRVSGLMMANHTSISSLFERTCRQYDKLRKREAFLEQFRKEDMFKDNFDEMDTSREIVQQLIDEYHAATRPDYISWGTQEQ

SEQ ID NO: 4493 - protein, 758 aa, Homo sapiens
MSFQKPKGTIEYTVESRDSLNSIALKFDTTPNELVQLNKLFSRAVVTGQVLYVPDPEYVSSVESSPSLSPVSPLSPTSSEAEFDKTTNPDVHPTEATPSSTFTGIRPARVVSSTSEEEEAFTEKFLKINCKYITSGKGTVSGVLLVTPNNIMFDPHKNDPLVQENGCEEYGIMCPMEEVMSAAMYKEILDSKIKESLPIDIDQLSGRDFCHSKKMTGSNTEEIDSRIRDAGNDSASTAPRSTEESLSEDVFTESELSPIREELVSSDELRQDKSSGASSESVQTVNQAEVESLTVKSESTGTPGHLRSDTEHSTNEVGTLCHKTDLNNLEMAIKEDQIADNFQGISGPKEDSTSIKGNSDQDSFLHENSLHQEESQKENMPCGETAEFKQKQSVNKGKQGKEQNQDSQTEAEELRKLWKTHTMQQTKQQRENIQQVSQKEAKHKITSADGHIESSALLKEKQRHRLHKFLCLRVGKPMRKTFVSQASATMQQYAQRDKKHEYWFAVPQERTDHLYAFFIQWSPEIYAEDTGEYTREPGFIVVKKIEESETIEDSSNQAAAREWEITTREDINSKQVATVKADLESESFRPNLSDPSELLLPDQIEKLTKHLPPRTIGYPWTLVYGTGKHGTSLKTLYRTMTGLDTPVLMVIKDSDGQVFGALASEPLKVSDGFYGTGETFVFTFCPEFEVFKWTGDNMFFIKGDMDSLAFGGGGGEFALWLDGDLYHGRSHSCKTFGNRTLSKKEDFFIQDIEIWAFE

SEQ ID NO: 4494 - protein, 165 aa, Homo sapiens
MKLFGFRSRRGQTVLGSIDHLYTGSGYRIRYSELQKIHKAAVKGDAAEMERCLARRSGDLDALDKQHRTALHLACASGHVKVVTLLVNRKCQIDIYDKENRTPLIQAVHCQEEACAVILLEHGANPNLKDIYGNTALHYAVYSESTSLAEKLLFHGENIEALDKV

SEQ ID NO: 4495 - protein, 757 aa, Homo sapiens
MLSLLVWILTLSDTFSQGTQTRFSQEPADQTVVAGQRAVLPCVLLNYSGIVQWTKDGLALGMGQGLKAWPRYRVVGSADAGQYNLEITDAELSDDASYECQATEAALRSRRAKLTVLIPPEDTRIDGGPVILLQAGTPHNLTCRAFNAKPAATIIWFRDGTQQEGAVASTELLKDGKRETTVSQLLINPTDLDIGRVFTCRSMNEAIPSGKETSIELDVHHPPTVTLSIEPQTVQEGERVVFTCQATANPEILGYRWAKGGFLIEDAHESRYETNVDYSFFTEPVSCEVHNKVGSTNVSTLVNVHFAPRIVVDPKPTTTDIGSDVTLTCVWVGNPPLTLTWTKKDSNMVLSNSNQLLLKSVTQADAGTYTCRAIVPRIGVAEREVPLYVNGPPIISSEAVQYAVRGDGGKVECFIGSTPPPDRIAWAWKENFLEVGTLERYTVERTNSGSGVLSTLTINNVMEADFQTHYNCTAWNSFGPGTAIIQLEEREVLPVGIIAGATIGASILLIFFFIALVFFLYRRRKGSRKDVTLRKLDIKVETVNREPLTMHSDREDDTASVSTATRVMKAIYSSFKDDVDLKQDLRCDTIDTREEYEMKDPTNGYYNVRAHEDRPSSRAVLYADYRAPGPARFDGRPSSRLSHSSGYAQLNTYSRGPASDYGPEPTPPGPAAPAGTDTTSQLSYENYEKFNSHPFPGAAGYPTYRLGYPQAPPSGLERTPYEAYDPIGKYATATRFSYTSQHSDYGQRFQQRMQTHV

SEQ ID NO: 4496 - protein, 1035 aa, Homo sapiens
MAAETLNFGPEWLRALSGGGSVASPPPSPAMPKYKLADYRYGREEMLALYVKENKVPEELQDKEFAAVLQDEPLQPLALEPLTEEEQRNFSLSVNSVAVLRLMGKGAGPPLAGTSRGRGSTRSRGRGRGDSCFYQRSIEEGDGAFGRSPREIQRSQSWDDRGERRFEKSARRDGARCGFEEGGAGPRKEHARSDSENWRSLREEQEEEEEGSWRLGAGPRRDGDRWRSASPDGGPRSAGWREHGERRRKFEFDLRGDRGGCGEEEGRGGGGSSHLRRCRAPEGFEEDKDGLPEWCLDDEDEEMGTFDASGAFLPLKKGPKEPIPEEQELDFQGLEEEEEPSEGLEEEGPEAGGKELTPLPPQEEKSSSPSPLPTLGPLWGTNGDGDETAEKEPPAAEDDIRGIQLSPGVGSSAGPPGDLEDDEGLKHLQQEAEKLVASLQDSSLEEEQFTAAMQTQGLRHSAAATALPLSHGAARKWFYKDPQGEIQGPFTTQEMAEWFQAGYFSMSLLVKRGCDEGFQPLGEVIKMWGRVPFAPGPSPPPLLGNMDQERLKKQQELAAAALYQQLQHQQFLQLVSSRQLPQCALREKAALGDLTPPPPPPPQQQQQQLTAFLQQLQALKPPRGGDQNLLPTMSRSLSVPDSGRLWDVHTSASSQSGGEASLWDIPINSSTQGPILEQLQLQHKFQERREVELRAKREEEERKRREEKRRQQQQEEQKRRQEEEELFRRKHVRQQELLLKLLQQQQAVPVPPAPSSPPPLWAGLAKQGLSMKTLLELQLEGERQLHKQPPPREPARAQAPNHRVQLGGLGTAPLNQWVSEAGPLWGGPDKSGGGSSGLGLWEDTPKSGGSLVRGLGLKNSRSSPSLSDSYSHLSGRPIRKKTEEEEKLLKLLQGIPRPQDGFTQWCEQMLHTLSATGSLDVPMAVAILKEVESPYDVHDYIRSCLGDTLEAKEFAKQFLERRAKQKASQQRQQQQEAWLSSASLQTAFQANHSTKLGPGEGSKAKRRALMLHSDPSILGYSLHGSSGEIESVDDY

SEQ ID NO: 4497 - protein, 94 aa, Homo sapiens
MRTLAILAAILLVALQAQAEPLQARADEVAAAPEQIAADIPEVVVSLAWDESLAPKHPGSRKNMDCYCRIPACIAGERRYGTCIYQGRLWAFCC

SEQ ID NO: 4498 - protein, 348 aa, Homo sapiens
MAHSQNSLELPININATQITTAYGHRALPKLKEELQSEDLQTRQKALMALCDLMHDPECIYKAMNIGCMENLKALLKDSNSMVRIKTTEVLHITASHSVGRYAFLEHDIVLALSFLLNDPSPVCRGNLYKAYMQLVQVPRGAQEIISKGLISSLVWKLQVEVEEEEFQEFILDTLVLCLQEDATEALGSNVVLVLKQKLLSANQNIRSKAARALLNVSISREGKKQVCHFDVIPILVHLLKDPVEHVKSNAAGALMFATVITEGKYAALEAQAIGLLLELLHSPMTIARLNATKALTMLAEAPEGRKALQTHVPTFRAMEVETYEKPQVAEALQRAARIAISVIEFKP

SEQ ID NO: 4499 - protein, 99 aa, Homo sapiens
MKVSAALLCLLLIAATFIPQGLAQPDAINAPVTCCYNFTNRKISVQRLASYRRITSSKCPKEAVIFKTIVAKEICADPKQKWVQDSMDHLDKQTQTPKT

SEQ ID NO: 4500 - protein, 233 aa, Homo sapiens
MDNQGVIYSDLNLPPNPKRQQRKPKGNKSSILATEQEITYAELNLQKASQDFQGNDKTYHCKDLPSAPEKLIVGILGIICLILMASVVTIVVIPSTLIQRHNNSSLNTRTQKARHCGHCPEEWITYSNSCYYIGKERRTWEESLLACTSKNSSLLSIDNEEEMKFLSIISPSSWIGVFRNSSHHPWVTMNGLAFKHEIKDSDNAELNCAVLQVNRLKSAQCGSSIIYHCKHKL

SEQ ID NO: 4501 - protein, 568 aa, Homo sapiens
MGGIMAPKDIMTNTHAKSILNSMNSLRKSNTLCDVTLRVEQKDFPAHRIVLAACSDYFCAMFTSELSEKGKPYVDIQGLTASTMEILLDFVYTETVHVTVENVQELLPAACLLQLKGVKQACCEFLESQLDPSNCLGIRDFAETHNCVDLMQAAEVFSQKHFPEVVQHEEFILLSQGEVEKLIKCDEIQVDSEEPVFEAVINWVKHAKKEREESLPNLLQYVRMPLLTPRYITDVIDAEPFIRCSLQCRDLVDEAKKFHLRPELRSQMQGPRTRARLGANEVLLVVGGFGSQQSPIDVVEKYDPKTQEWSFLPSITRKRRYVASVSLHDRIYVIGGYDGRSRLSSVECLDYTADEDGVWYSVAPMNVRRGLAGATTLGDMIYVSGGFDGSRRHTSMERYDPNIDQWSMLGDMQTAREGAGLVVASGVIYCLGGYDGLNILNSVEKYDPHTGHWTNVTPMATKRSGAGVALLNDHIYVVGGFDGTAHLSSVEAYNIRTDSWTTVTSMTTPRCYVGATVLRGRLYAIAGYDGNSLLSSIECYDPIIDSWEVVTSMGTQRCDAGVCVLREK

SEQ ID NO: 4502 - protein, 237 aa, Homo sapiens
MALPPSPLAMEYVNDFDLMKFEVKREPSEGRPGPPTASLGSTPYSSVPPSPTFSEPGMVGATEGTRPGLEELYWLATLQQQLGAGEALGLSPEEAMELLQGQGPVPVDGPHGYYPGSPEETGAQHVQLAERFSDAALVSMSVRELNRQLRGCGRDEALRLKQRRRTLKNRGYAQACRSKRLQQRRGLEAERARLAAQLDALRAEVARLARERDLYKARCDRLTSSGPGSGDPSHLFL

SEQ ID NO: 4503 - protein, 762 aa, Homo sapiens
MASLLQDQLTTDQDLLLMQEGMPMRKVRSKSWKKLRYFRLQNDGMTVWHARQARGSAKPSFSISDVETIRNGHDSELLRSLAEELPLEQGFTIVFHGRRSNLDLMANSVEEAQIWMRGLQLLVDLVTSMDHQERLDQWLSDWFQRGDKNQDGKMSFQEVQRLLHLMNVEMDQEYAFSLFQAADTSQSGTLEGEEFVQFYKALTKRAEVQELFESFSADGQKLTLLEFLDFLQEEQKERDCTSELALELIDRYEPSDSGKLRHVLSMDGFLSYLCSKDGDIFNPACLPIYQDMTQPLNHYFICSSHNTYLVGDQLCGQSSVEGYIRALKRGCRCVEVDVWDGPSGEPVVYHGHTLTSRILFKDVVATVAQYAFQTSDYPVILSLETHCSWEQQQTMARHLTEILGEQLLSTTLDGVLPTQLPSPEELRRKILVKGKKLTLEEDLEYEEEEAEPELEESELALESQFETEPEPQEQNLQNKDKKKKSKPILCPALSSLVIYLKSVSFRSFTHSKEHYHFYEISSFSETKAKRLIKEAGNEFVQHNTWQLSRVYPSGLRTDSSNYNPQELWNAGCQMVAMNMQTAGLEMDICDGHFRQNGGCGYVLKPDFLRDIQSSFHPEKPISPFKAQTLLIQVISGQQLPKVDKTKEGSIVDPLVKVQIFGVRLDTARQETNYVENNGFNPYWGQTLCFRVLVPELAMLRFVVMDYDWKSRNDFIGQYTLPWTCMQQGYRHIHLLSKDGISLRPASIFVYICIQEGLEGDES

SEQ ID NO: 4504 - protein, 314 aa, Homo sapiens
MSGAGVAAGTRPPSSPTPGSRRRRQRPSVGVQSLRPQSPQLRQSDPQKRNLDLEKSLQFLQQQHSEMLAKLHEEIEHLKRENKDLRYKLIMNQTSQKKDSLSTSSFQSVKSISNSGKARPQPGSFNKQDSKADVPQKADLEEEPLLHNSKLDKVPGVQGQARKEKAEASNAGAACMGNSQHQGRQMGAAAHPPMILPLPLRKPTTLRQCEVLIRELWNTNLLQTQELQHLKSLLEGSQRPQAVPEEASFPRDQEATHFPKVSTKSLSKKCLLLSPPVAERAILPALKQTPKNNFAERQKRLQAMQKRRLHRSVL

SEQ ID NO: 4505 - protein, 359 aa, Homo sapiens
MSDEGSRGSRLPLALPPASQGCSSGGGGGGSSAGGSGNSRPPRNLQGLLQMAITAGSEEPDPPPEPMSEERRQWLQEAMSAAFRGQREEVEQMKSCLRVLSQPMPPTAGEAEQAADQQEREGALELLADLCENMDNAADFCQLSGMHLLVGRYLEAGAAGLRWRAAQLIGTCSQNVAAIQEQVLGLGALRKLLRLLDRDACDTVRVKALFAISCLVREQEAGLLQFLRLDGFSVLMRAMQQQVQKLKVKSAFLLQNLLVGHPEHKGTLCSMGMVQQLVALVRTEHSPFHEHVLGALCSLVTDFPQGVRECREPELGLEELLRHRCQLLQQHEEYQEELEFCEKLLQTCFSSPADDSMDR

SEQ ID NO: 4506 - protein, 639 aa, Homo sapiens
MSARGPAIGIDLGTTYSCVGVFQHGKVEIIANDQGNRTTPSYVAFTDTERLIGDAAKNQVAMNPTNTIFDAKRLIGRKFEDATVQSDMKHWPFRVVSEGGKPKVQVEYKGETKTFFPEEISSMVLTKMKEIAEAYLGGKVHSAVITVPAYFNDSQRQATKDAGTITGLNVLRIINEPTAAAIAYGLDKKGCAGGEKNVLIFDLGGGTFDVSILTIEDGIFEVKSTAGDTHLGGEDFDNRMVSHLAEEFKRKHKKDIGPNKRAVRRLRTACERAKRTLSSSTQASIEIDSLYEGVDFYTSITRARFEELNADLFRGTLEPVEKALRDAKLDKGQIQEIVLVGGSTRIPKIQKLLQDFFNGKELNKSINPDEAVAYGAAVQAAILIGDKSENVQDLLLLDVTPLSLGIETAGGVMTPLIKRNTTIPTKQTQTFTTYSDNQSSVLVQVYEGERAMTKDNNLLGKFDLTGIPPAPRGVPQIEVTFDIDANGILNVTAADKSTGKENKITITNDKGRLSKDDIDRMVQEAERYKSEDEANRDRVAAKNALESYTYNIKQTVEDEKLRGKISEQDKNKILDKCQEVINWLDRNQMAEKDEYEHKQKELERVCNPIISKLYQGGPGGGSGGGGSGASGGPTIEEVD

SEQ ID NO: 4507 - protein, 211 aa, Homo sapiens
MAQAKINAKANEGRFCRSSSMADRSSRLLESLDQLELRVEALREAATAVEQEKEILLEMIHSIQNSQDMRQISDGEREELNLTANRLMGRTLTVEVSVETIRNPQQQESLKHATRIIDEVVNKFLDDLGNAKSHLMSLYSACSSEVPHGPVDQKFQSIVIGCALEDQKKIKRRLETLLRNIENSDKAIKLLEHSKGAGSKTLQQNAESRFN

SEQ ID NO: 4508 - protein, 352 aa, Homo sapiens
MEGISIYTSDNYTEEMGSGDYDSMKEPCFREENANFNKIFLPTIYSIIFLTGIVGNGLVILVMGYQKKLRSMTDKYRLHLSVADLLFVITLPFWAVDAVANWYFGNFLCKAVHVIYTVNLYSSVLILAFISLDRYLAIVHATNSQRPRKLLAEKVVYVGVWIPALLLTIPDFIFANVSEADDRYICDRFYPNDLWVVVFQFQHIMVGLILPGIVILSCYCIIISKLSHSKGHQKRKALKTTVILILAFFACWLPYYIGISIDSFILLEIIKQGCEFENTVHKWISITEALAFFHCCLNPILYAFLGAKFKTSAQHALTSVSRGSSLKILSKGKRGGHSSVSTESESSSFHSS

SEQ ID NO: 4509 - protein, 205 aa, Homo sapiens
MMPRHLLPHSGITSLRRVPRRRLPSRRREDFRRFLFLSFVSTDKDGDPTGQASPAVPVPHFTTWGSLIPIDSQRNKERTRFTWMDGPPHGGLGTRFSGRGSASLTAPPGRCFTRERHPVPRQRKCRRQHSTGRKPHCGTRSAAPRNPKSIHKRSFSAKSLKNKTRNESPPVSALVSRTKTQPGQLHFCCQPSSSQAPASRRAKGR

SEQ ID NO: 4510 - protein, 794 aa, Homo sapiens
MAGWIQAQQLQGDALRQMQVLYGQHFPIEVRHYLAQWIESQPWDAIDLDNPQDRAQATQLLEGLVQELQKKAEHQVGEDGFLLKIKLGHYATQLQKTYDRCPLELVRCIRHILYNEQRLVREANNCSSPAGILVDAMSQKHLQINQTFEELRLVTQDTENELKKLQQTQEYFIIQYQESLRIQAQFAQLAQLSPQERLSRETALQQKQVSLEAWLQREAQTLQQYRVELAEKHQKTLQLLRKQQTIILDDELIQWKRRQQLAGNGGPPEGSLDVLQSWCEKLAEIIWQNRQQIRRAEHLCQQLPIPGPVEEMLAEVNATITDIISALVTSTFIIEKQPPQVLKTQTKFAATVRLLVGGKLNVHMNPPQVKATIISEQQAKSLLKNENTRNECSGEILNNCCVMEYHQATGTLSAHFRNMSLKRIKRADRRGAESVTEEKFTVLFESQFSVGSNELVFQVKTLSLPVVVIVHGSQDHNATATVLWDNAFAEPGRVPFAVPDKVLWPQLCEALNMKFKAEVQSNRGLTKENLVFLAQKLFNNSSSHLEDYSGLSVSWSQFNRENLPGWNYTFWQWFDGVMEVLKKHHKPHWNDGAILGFVNKQQAHDLLINKPDGTFLLRFSDSEIGGITIAWKFDSPERNLWNLKPFTTRDFSIRSLADRLGDLSYLIYVFPDRPKDEVFSKYYTPVLAKAVDGYVKPQIKQVVPEFVNASADAGGSSATYMDQAPSPAVCPQAPYNMYPQNPDHVLDQDGEFDLDETMDVARHVEELLRRPMDSLDSRLSPPAGLFTSARGSLS

SEQ ID NO: 4511 - protein, 191 aa, Homo sapiens
MGGSGSRLSKELLAEYQDLTFLTKQEILLAHRRFCELLPQEQRSVESSLRAQVPFEQILSLPELKANPFKERICRVFSTSPAKDSLSFEDFLDLLSVFSDTATPDIKSHYAFRIFDFDDDGTLNREDLSRLVNCLTGEGEDTRLSASEMKQLIDNILEESDIDRDGTINLSEFQHVISRSPDFASSFKIVL

SEQ ID NO: 4512 - protein, 514 aa, Homo sapiens
MSYGSIARGGGLGSRGPFGGPSRQGCQPLECARCWTEYGIRHFPCPSPESKLQNRCVGKDGEGDLGPAGTPIVPRARKRGPGVAPEGSRMPEPTSSPTIGPRKDSAAGPHGRMAGPSTTRAKKRKPNFCPQETEVLVSKVSKHHQLLFGTGLLKAEPTRRYRVWSRILQAVNALGYCRRDVVDLKHKWRDLRAVVRRKLGDLRKAAHGPSPGSGKPQALALTPVEQVVAKTFSCQALPSEGFSLEPPRATQVDPCNLQELFQEMSANVFRINSSVTSLERSLQSLGTPSDTQELRDSLHTAQQETNKTIAASASSVKQMAELLRSSCPQERLQQERPQLDRLKTQLSDAIQCYGVVQKKIAEKSRALLPMAQRGSKQQSPQAPFAELADDEKVFNGSDNMWQGQEQALLPDITEEDLEAIRLREEAILQMESNLLDVNQIIKDLASMVSEQGEAVDSIEASLEAASSHAEAARQLLAGASRHQLQRHKIKCCFLSAGVTALLVIIIIIATSVRK

SEQ ID NO: 4513 - protein, 278 aa, Homo sapiens
MEPQEERETQVAAWLKKIFGDHPIPQYEVNPRTTEILHHLSERNRVRDRDVYLVIEDLKQKASEYESEAKYLQDLLMESVNFSPANLSSTGSRYLNALVDSAVALETKDTSLASFIPAVNDLTSDLFRTKSKSEEIKIELEKLEKNLTATLVLEKCLQEDVKKAELHLSTERAKVDNRRQNMDFLKAKSEEFRFGIKAAEEQLSARGMDASLSHQSLVALSEKLARLKQQTIPLKKKLESYLDLMPNPSLAQVKIEEAKRELDSIEAELTRRVDMMEL

SEQ ID NO: 4514 - protein, 177 aa, Homo sapiens
MESIYLQKHLGACLTQGLAEVARVRPVDPIEYLALWIYKYKENVTMEQLRQKEMAKLERERELALMEQEMMERLKAEELLLQQQQLALQLELEMQEKERQRIQELQRAQEQLGKEMRMNMENLVRNEDILHSEEATLDSGKTLAEISDRYGAPNLSRVEELDEPMFSDIALNIDQDL

SEQ ID NO: 4515 - protein, 412 aa, Homo sapiens
MKMHLQRALVVLALLNFATVSLSLSTCTTLDFGHIKKKRVEAIRGQILSKLRLTSPPEPTVMTHVPYQVLALYNSTRELLEEMHGEREEGCTQENTESEYYAKEIHKFDMIQGLAEHNELAVCPKGITSKVFRFNVSSVEKNRTNLFRAEFRVLRVPNPSSKRNEQRIELFQILRPDEHIAKQRYIGGKNLPTRGTAEWLSFDVTDTVREWLLRRESNLGLEISIHCPCHTFQPNGDILENIHEVMEIKFKGVDNEDDHGRGDLGRLKKQKDHHNPHLILMMIPPHRLDNPGQGGQRKKRALDTNYCFRNLEENCCVRPLYIDFRQDLGWKWVHEPKGYYANFCSGPCPYLRSADTTHSTVLGLYNTLNPEASASPCCVPQDLEPLTILYYVGRTPKVEQLSNMVVKSCKCS

SEQ ID NO: 4516 - protein, 263 aa, Homo sapiens
MAFLWLLSCWALLGTTFGCGVPAIHPVLSGLSRIVNGEDAVPGSWPWQVSLQDKTGFHFCGGSLISEDWVVTAAHCGVRTSDVVVAGEFDQGSDEENIQVLKIAKVFKNPKFSILTVNNDITLLKLATPARFSQTVSAVCLPSADDDFPAGTLCATTGWGKTKYNANKTPDKLQQAALPLLSNAECKKSWGRRITDVMICAGASGVSSCMGDSGGPLVCQKDGAWTLVGIVSWGSRTCSTTTPAVYARVAKLIPWVQKILAAN

SEQ ID NO: 4517 - protein, 356 aa, Homo sapiens
MAGVACLGKAADADEWCDSGLGSLGPDAAAPGGPGLGAELGPGLSWAPLVFGYVTEDGDTALHLAVIHQHEPFLDFLLGFSAGTEYMDLQNDLGQTALHLAAILGETSTVEKLYAAGAGLCVAERRGHTALHLACRVGAHACARALLQPRPRRPREAPDTYLAQGPDRTPDTNHTPVALYPDSDLEKEEEESEEDWKLQLEAENYEGHTPLHVAVIHKDVEMVRLLRDAGADLDKPEPTCGRSPLHLAVEAQAADVLELLLRAGANPAARMYGGRTPLGSAMLRPNPILARLLRAHGAPEPEGEDEKSGPCSSSSDSDSGDEGDEYDDIVVHSSRSQTRLPPTPASKPLPDDPRPV

SEQ ID NO: 4518 - protein, 126 aa, Homo sapiens
MSYKPIAPAPSSTPGSSTPGPGTPVPTGSVPSPSGSVPGAGAPFRPLFNDFGPPSMGYVQAMKPPGAQGSQSTYTDLLSVIEEMGKEIRPTYAGSKSAMERLKRGIIHARALVRECLAETERNART

SEQ ID NO: 4519 - protein, 398 aa, Homo sapiens
MMWLLLTTTCLICGTLNAGGFLDLENEVNPEVWMNTSEIIIYNGYPSEEYEVTTEDGYILLVNRIPYGRTHARSTGPRPVVYMQHALFADNAYWLENYANGSLGFLLADAGYDVWMGNSRGNTWSRRHKTLSETDEKFWAFSFDEMAKYDLPGVIDFIVNKTGQEKLYFIGHSLGTTIGFVAFSTMPELAQRIKMNFALGPTISFKYPTGIFTRFFLLPNSIIKAVFGTKGFFLEDKKTKIASTKICNNKILWLICSEFMSLWAGSNKKNMNQSRMDVYMSHAPTGSSVHNILHIKQLYHSDEFRAYDWGNDADNMKHYNQSHPPIYDLTAMKVPTAIWAGGHDVLVTPQDVARILPQIKSLHYFKLLPDWNHFDFVWGLDAPQRMYSEIIALMKAYS

SEQ ID NO: 4520 - protein, 566 aa, Homo sapiens
MPGKPKHLGVPNGRMVLAVSDGELSSTTGPQGQGEGRGSSLSIHSLPSGPSSPFPTEEQPVASWALSFERLLQDPLGLAYFTEFLKKEFSAENVTFWKACERFQQIPASDTQQLAQEARNIYQEFLSSQALSPVNIDRQAWLGEEVLAEPRPDMFRAQQLQIFNLMKFDSYARFVKSPLYRECLLAEAEGRPLREPGSSRLGSPDATRKKPKLKPGKSLPLGVEELGQLPPVEGPGGRPLRKSFRRELGGTANAALRRESQGSLNSSASLDLGFLAFVSSKSESHRKSLGSTEGESESRPGKYCCVYLPDGTASLALARPGLTIRDMLAGICEKRGLSLPDIKVYLVGNEQALVLDQDCTVLADQEVRLENRITFELELTALERVVRISAKPTKRLQEALQPILEKHGLSPLEVVLHRPGEKQPLDLGKLVSSVAAQRLVLDTLPGVKISKARDKSPCRSQGCPPRTQDKATHPPPASPSSLVKVPSSATGKRQTCDIEGLVELLNRVQSSGAHDQRGLLRKEDLVLPEFLQLPAQGPSSEETPPQTKSAAQPIGGSLNSTTDSAL

SEQ ID NO: 4521 - protein, 493 aa, Homo sapiens
MHTLVFLSTRQVLQCQPAACQALPLLPRELFPLLFKVAFMDKKTVVLRELVHTWPFPLLSFQQLLQECAHCSRALLQERPSTESMQAVILGLTARLHTSEPGASTQPLCRKHALRVLDMTGLLDDGVEQDPGTMSMWDCTAAVARTCIAQQQGGAAEPGPAPIPVEVRVDLRVNRASYAFLREALRSSVGSPLRLCCRDLRAEDLPMRNTVALLQLLDAGCLRRVDLRFNNLGLRGLSVIIPHVARFQHLASLRLHYVHGDSRQPSVDGEDNFRYFLAQMGRFTCLRELSMGSSLLSGRLDQLLSTLQSPLESLELAFCALLPEDLRFLARSPHAAHLKKLDLSGNDLSGSQLAPFQGLLQASAATLLHLELTECQLADTQLLATLPILTQCASLRYLGLYGNPLSMAGLKELLRDSVAQAELRTVVHPFPVDCYEGLPWPPPASVLLEASINEEKFARVEAELHQLLLASGRAHVLWTTDIYGRLAADYFSL

SEQ ID NO: 4522 - protein, 683 aa, Homo sapiens
MALFVRLLALALALALGPAATLAGPAKSPYQLVLQHSRLRGRQHGPNVCAVQKVIGTNRKYFTNCKQWYQRKICGKSTVISYECCPGYEKVPGEKGCPAALPLSNLYETLGVVGSTTTQLYTDRTEKLRPEMEGPGSFTIFAPSNEAWASLPAEVLDSLVSNVNIELLNALRYHMVGRRVLTDELKHGMTLTSMYQNSNIQIHHYPNGIVTVNCARLLKADHHATNGVVHLIDKVISTITNNIQQIIEIEDTFETLRAAVAASGLNTMLEGNGQYTLLAPTNEAFEKIPSETLNRILGDPEALRDLLNNHILKSAMCAEAIVAGLSVETLEGTTLEVGCSGDMLTINGKAIISNKDILATNGVIHYIDELLIPDSAKTLFELAAESDVSTAIDLFRQAGLGNHLSGSERLTLLAPLNSVFKDGTPPIDAHTRNLLRNHIIKDQLASKYLYHGQTLETLGGKKLRVFVYRNSLCIENSCIAAHDKRGRYGTLFTMDRVLTPPMGTVMDVLKGDNRFSMLVAAIQSAGLTETLNREGVYTVFAPTNEAFRALPPRERSRLLGDAKELANILKYHIGDEILVSGGIGALVRLKSLQGDKLEVSLKNNVVSVNKEPVAEPDIMATNGVVHVITNVLQPPANRPQERGDELADSALEIFKQASAFSRASQRSVRLAPVYQKLLERMKH

SEQ ID NO: 4523 - protein, 239 aa, Homo sapiens
MAHAGRTGYDNREIVMKYIHYKLSQRGYEWDAGDVGAAPPGAAPAPGIFSSQPGHTPHPAASRDPVARTSPLQTPAAPGAAAGPALSPVPPVVHLTLRQAGDDFSRRYRRDFAEMSSQLHLTPFTARGRFATVVEELFRDGVNWGRIVAFFEFGGVMCVESVNREMSPLVDNIALWMTEYLNRHLHTWIQDNGGWDAFVELYGPSMRPLFDFSWLSLKTLLSLALVGACITLGAYLGHK

SEQ ID NO: 4524 - protein, 472 aa, Homo sapiens
MGGTQVKCLTSPSPIHSAKSESIITQSEEKADFVIIPAEGIENRTEGTDSPLSRDWRPGSPGTYLETSWEEQLLEQQEYLEKEMEEAKKMISGLQALLLNGSLPEDEQERPLALCEPGVNPEEQLIIIQSRLDQSMEENQDLKKELLKCKQEARNLQGIKDALQQRLTQQDTSVLQLKQELLRANMDKDELHNQNVDLQRKLDERNRLLGEYKKELGQKDRLLQQHQAKLEEALRKLSDVSYHQVDLERELEHKDVLLAHCMKREADEATNYNSHNSQSNGFLLPTAGKGATSVSNRGTSDLQLVRDALRSLRNSFSGHDPQHHTIDSLEQGISSLMERLHVMETQKKQERKVRVKSPRTQVGSEYRESWPPNSKLPHSQSSPTVSSTCTKVLYFTDRSLTPFMVNIPKRLEEVTLKDFKAAIDREGNHRYHFKALDPEFGTVKEEIFHDDDAIPGWEGKIVAWVEEDHGEN

SEQ ID NO: 4525 - protein, 278 aa, Homo sapiens
MDFSRNLYDIGEQLDSEDLASLKFLSLDYIPQRKQEPIKDALMLFQRLQEKRMLEESNLSFLKELLFRINRLDLLITYLNTRKEEMERELQTPGRAQISAYRVMLYQISEEVSRSELRSFKFLLQEEISKCKLDDDMNLLDIFIEMEKRVILGEGKLDILKRVCAQINKSLLKIINDYEEFSKGEELCGVMTISDSPREQDSESQTLDKVYQMKSKPRGYCLIINNHNFAKAREKVPKLHSIRDRNGTHLDAGSHSVAQAGVQWCDLGSLQPPPPWFG

SEQ ID NO: 4526 - protein, 622 aa, Homo sapiens
MAENTEGDLNSNLPHAPYHTGDPQLDTAIGQWLRWDKNPKTKEQIENLLRNGMNKELRDRLCCRMTFGTAGLRSAMGAGFCYINDLTVIQSTQGMYKYLERCFSDFKQRGFVVGYDTRGQVTSSCSSQRLAKLTAAVLLAKDVPVYLFSRYVPTPFVPYAVQKLKAVAGVMITASHNRKEDNGYKVYWETGAQITSPHDKEILKCIEECVEPWNGSWNDNLVDTSPLKRDPLQDICRRYMEDLKKICFYRELNSKTTLKFVHTSFHGVGHDYVQLAFKVFGFKPPIPVPEQKDPDPDFSTVKCPNPEEGESVLELSLRLAEKENARVVLATDPDADRLAAAELQENGCWKVFTGNELAALFGWWMFDCWKKNKSRNADVKNVYMLATTVSSKILKAIALKEGFHFEETLPGFKWIGSRIIDLLENGKEVLFAFEESIGFLCGTSVLDKDGVSAAVVVAEMASYLETMNITLKQQLVKVYEKYGYHISKTSYFLCYEPPTIKSIFERLRNFDSPKEYPKFCGTFAILHVRDITTGYDSSQPNKKSVLPVSKNSQMITFTFQNGCVATLRTSGTEPKIKYYAEMCASPDQSDTALLEEELKKLIDALIENFLQPSKNGLIWRSV

SEQ ID NO: 4527 - protein, 288 aa, Homo sapiens
MQIPQAPWPVVWAVLQLGWRPGWFLDSPDRPWNPPTFSPALLVVTEGDNATFTCSFSNTSESFVLNWYRMSPSNQTDKLAAFPEDRSQPGQDCRFRVTQLPNGRDFHMSVVRARRNDSGTYLCGAISLAPKAQIKESLRAELRVTERRAEVPTAHPSPSPRPAGQFQTLVVGVVGGLLGSLVLLVWVLAVICSRAARGTIGARRTGQPLKEDPSAVPVFSVDYGELDFQWREKTPEPPVPCVPEQTEYATIVFPSGMGTSSPARRGSADGPRSAQPLRPEDGHCSWPL

SEQ ID NO: 4528 - protein, 328 aa, Homo sapiens
MRPVRLMKVFVTRRIPAEGRVALARAADCEVEQWDSDEPIPAKELERGVAGAHGLLCLLSDHVDKRILDAAGANLKVISTMSVGIDHLALDEIKKRGIRVGYTPDVLTDTTAELAVSLLLTTCRRLPEAIEEVKNGGWTSWKPLWLCGYGLTQSTVGIIGLGRIGQAIARRLKPFGVQRFLYTGRQPRPEEAAEFQAEFVSTPELAAQSDFIVVACSLTPATEGLCNKDFFQKMKETAVFINISRGDVVNQDDLYQALASGKIAAAGLDVTSPEPLPTNHPLLTLKNCVILPHIGSATHRTRNTMSLLAANNLLAGLRGEPMPSELKL

SEQ ID NO: 4529 - protein, 237 aa, Homo sapiens
MNSRRREPITLQDPEAKYPLPLIEKEKISHNTRRFRFGLPSPDHVLGLPVGNYVQLLAKIDNELVVRAYTPVSSDDDRGFVDLIIKIYFKNVHPQYPEGGKMTQYLENMKIGETIFFRGPRGRLFYHGPGNLGIRPDQTSEPKKTLADHLGMIAGGTGITPMLQLIRHITKDPSDRTRMSLIFANQTEEDILVRKELEEIARTHPDQFDLWYTLDRPPIGPWSAEGATLLSNSAQFH

SEQ ID NO: 4530 - protein, 282 aa, Homo sapiens
MASSFLPAGAITGDSGGELSSGDDSGEVEFPHSPEIEETSCLAELFEKAAAHLQGLIQVASREQLLYLYARYKQVKVGNCNTPKPSFFDFEGKQKWEAWKALGDSSPSQAMQEYIAVVKKLDPGWNPQIPEKKGKEANTGFGGPVISSLYHEETIREEDKNIFDYCRENNIDHITKAIKSKNVDVNVKDEEGRALLHWACDRGHKELVTVLLQHRADINCQDNEGQTALHYASACEFLDIVELLLQSGADPTLRDQDGCLPEEVTGCKTVSLVLQRHTTGKA

SEQ ID NO: 4531 - protein, 301 aa, Homo sapiens
MTTLDDKLLGEKLQYYYSSSEDEDSDHEDKDRGRCAPASSSVPAEAELAGEGISVNTGPKGVINDWRRFKQLETEQREEQCREMERLIKKLSMTCRSHLDEEEEQQKQKDLQEKISGKMTLKEFAIMNEDQDDEEFLQQYRKQRMEEMRQQLHKGPQFKQVFEISSGEGFLDMIDKEQKSIVIMVHIYEDGIPGTEAMNGCMICLAAEYPAVKFCKVKSSVIGASSQFTRNALPALLIYKGGELIGNFVRVTDQLGDDFFAVDLEAFLQEFGLLPEKEVLVLTSVRNSATCHSEDSDLEID

SEQ ID NO: 4532 - protein, 599 aa, Homo sapiens
MDVHDLFRRLGAGAKFDTRRFSADAARFQIGKRKYDFDSSEVLQGLDFFGNKKSVPGVCGASQTHQKPQNGEKKEESLTERKREQSKKKRKTMTSEIASQEEGATIQWMSSVEAKIEDKKVQRESKLTSGKLENLRKEKINFLRNKHKIHVQGTDLPDPIATFQQLDQEYKINSRLLQNILDAGFQMPTPIQMQAIPVMLHGRELLASAPTGSGKTLAFSIPILMQLKQPANKGFRALIISPTRELASQIHRELIKISEGTGFRIHMIHKAAVAAKKFGPKSSKKFDILVTTPNRLIYLLKQDPPGIDLASVEWLVVDESDKLFEDGKTGFRDQLASIFLACTSHKVRRAMFSATFAYDVEQWCKLNLDNVISVSIGARNSAVETVEQELLFVGSETGKLLAVRELVKKGFNPPVLVFVQSIERAKELFHELIYEGINVDVIHAERTQQQRDNTVHSFRAGKIWVLICTALLARGIDFKGVNLVINYDFPTSSVEYIHRIGRTGRAGNKGKAITFFTEDDKPLLRSVANVIQQAGCPVPEYIKGFQKLLSKQKKKMIKKPLERESISTTPKCFLEKAKDKQKKVTGQNSKKKVALEDKS

SEQ ID NO: 4533 - protein, 362 aa, Homo sapiens
MGNHTWEGCHVDSRVDHLFPPSLYIFVIGVGLPTNCLALWAAYRQVQQRNELGVYLMNLSIADLLYICTLPLWVDYFLHHDNWIHGPGSCKLFGFIFYTNIYISIAFLCCISVDRYLAVAHPLRFARLRRVKTAVAVSSVVWATELGANSAPLFHDELFRDRYNHTFCFEKFPMEGWVAWMNLYRVFVGFLFPWALMLLSYRGILRAVRGSVSTERQEKAKIKRLALSLIAIVLVCFAPYHVLLLSRSAIYLGRPWDCGFEERVFSAYHSSLAFTSLNCVADPILYCLVNEGARSDVAKALHNLLRFLASDKPQEMANASLTLETPLTSKRNSTAKAMTGSWAATPPSQGDQVQLKMLPPAQ

SEQ ID NO: 4534 - protein, 116 aa, Homo sapiens
MSWRGRSTYRPRPRRYVEPPEMIGPMRPEQFSDEVEPATPEEGEPATQRQDPAAAQEGQDEGASAGQGPKPEAHSQEQGHPQTGCECEDGPDGQEMDPPNPEEVKTPEEGEKQSQC

SEQ ID NO: 4535 - protein, 210 aa, Homo sapiens
MDDEEETYRLWKIRKTIMQLCHDRGYLVTQDELDQTLEEFKAQFGDKPSEGRPRRTDLTVLVAHNDDPTDQMFVFFPEEPKVGIKTIKVYCQRMQEENITRALIVVQQGMTPSAKQSLVDMAPKYILEQFLQQELLINITEHELVPEHVVMTKEEVTELLARYKLRENQLPRIQAGDPVARYFGIKRGQVVKIIRPSETAGRYITYRLVQ

SEQ ID NO: 4536 - protein, 217 aa, Homo sapiens
MAGRTVRAETRSRAKDDIKKVMATIEKVRRWEKRWVTVGDTSLRIFKWVPVVDPQEEERRRAGGGAERSRGRERRGRGASPRGGGPLILLDLNDENSNQSFHSEGSLQKGTEPSPGGTPQPSRPVSPAGPPEGVPEEAQPPRLGQERDPGGITAGSTDEPPMLTKEEPVPELLEAEAPEAYPVFEPVPPVPEAAQGDTEDSEGAPPLKRICPNAPDP

SEQ ID NO: 4537 - protein, 597 aa, Homo sapiens
MAEIIQERIEDRLPELEQLERIGLFSHAEIKAIIKKASDLEYKIQRRTLFKEDFINYVQYEINLLELIQRRRTRIGYSFKKDEIENSIVHRVQGVFQRASAKWKDDVQLWLSYVAFCKKWATKTRLSKVFSAMLAIHSNKPALWIMAAKWEMEDRLSSESARQLFLRALRFHPECPKLYKEYFRMELMHAEKLRKEKEEFEKASMDVENPDYSEEILKGELAWIIYKNSVSIIKGAEFHVSLLSIAQLFDFAKDLQKEIYDDLQALHTDDPLTWDYVARRELEIESQTEEQPTTKQAKAVEVGRKEERCCAVYEEAVKTLPTEAMWKCYITFCLERFTKKSNSGFLRGKRLERTMTVFRKAHELKLLSECQYKQLSVSLLCYNFLREALEVAVAGTELFRDSGTMWQLKLQVLIESKSPDIAMLFEEAFVHLKPQVCLPLWISWAEWSEGAKSQEDTEAVFKKALLAVIGADSVTLKNKYLDWAYRSGGYKKARAVFKSLQESRPFSVDFFRKMIQFEKEQESCNMANIREYYERALREFGSADSDLWMDYMKEELNHPLGRPENCGQIYWRAMKMLQGESAEAFVAKHAMHQTGHL

SEQ ID NO: 4538 - protein, 350 aa, Homo sapiens
MGCFFSKRRKADKESRPENEEERPKQYSWDQREKVDPKDYMFSGLKDETVGRLPGTVAGQQFLIQDCENCNIYIFDHSATVTIDDCTNCIIFLGPVKGSVFFRNCRDCKCTLACQQFRVRDCRKLEVFLCCATQPIIESSSNIKFGCFQWYYPELAFQFKDAGLSIFNNTWSNIHDFTPVSGELNWSLLPEDAVVQDYVPIPTTEELKAVRVSTEANRSIVPISRGQRQKSSDESCLVVLFAGDYTIANARKLIDEMVGKGFFLVQTKEVSMKAEDAQRVFREKAPDFLPLLNKGPVIALEFNGDGAVEVCQLIVNEIFNGTKMFVSESKETASGDVDSFYNFADIQMGI

SEQ ID NO: 4539 - DNA, 42 bp, synthetic construct
  misc_feature 1..42: note = Nucleotide sequence
  source 1..42: mol_type = other DNA
tggaccctgtggacacagccacatattactgtgcacacagac

SEQ ID NO: 4540 - DNA, 90 bp, synthetic construct
  misc_feature 1..90: note = Nucleotide sequence
  source 1..90: mol_type = other DNA
tggaccctgtggacacagccacatatttttgtgcacacaagaaccttcagtattcggaatggttcgacccctggggccagggcaccctgg

SEQ ID NO: 4541 - DNA, 51 bp, synthetic construct
  misc_feature 1..51: note = Nucleotide sequence
  source 1..51: mol_type = other DNA
acaactggttcgactcctggggccaaggaaccctggtcaccgtctcctcag

SEQ ID NO: 4542 - protein, 220 aa, synthetic construct; identical to SEQ ID NO: 1
  REGION 1..220: note = Amino acid sequence

SEQ ID NO: 4543 - protein, 220 aa, synthetic construct; identical to SEQ ID NO: 2
  REGION 1..220: note = Amino acid sequence

SEQ ID NO: 4544 - protein, 223 aa, synthetic construct; identical to SEQ ID NO: 3
  REGION 1..223: note = Amino acid sequence

SEQ ID NO: 4545 - protein, 119 aa, synthetic construct; identical to SEQ ID NO: 4
  REGION 1..119: note = Amino acid sequence

SEQ ID NO: 4546 - protein, 223 aa, synthetic construct; identical to SEQ ID NO: 5
  REGION 1..223: note = Amino acid sequence

SEQ ID NO: 4547 - protein, 221 aa, synthetic construct; identical to SEQ ID NO: 6
  REGION 1..221: note = Amino acid sequence

SEQ ID NO: 4548 - protein, 122 aa, synthetic construct; identical to SEQ ID NO: 7
  REGION 1..122: note = Amino acid sequence

SEQ ID NO: 4549 - protein, 222 aa, synthetic construct; identical to SEQ ID NO: 8
  REGION 1..222: note = Amino acid sequence

SEQ ID NO: 4550 - protein, 124 aa, synthetic construct; identical to SEQ ID NO: 9
  REGION 1..124: note = Amino acid sequence

SEQ ID NO: 4551 - protein, 221 aa, synthetic construct; identical to SEQ ID NO: 10
  REGION 1..221: note = Amino acid sequence

SEQ ID NO: 4552 - protein, 222 aa, synthetic construct; identical to SEQ ID NO: 11
  REGION 1..222: note = Amino acid sequence

SEQ ID NO: 4553 - protein, 118 aa, synthetic construct; identical to SEQ ID NO: 12
  REGION 1..118: note = Amino acid sequence

SEQ ID NO: 4554 - protein, 222 aa, synthetic construct; identical to SEQ ID NO: 13
  REGION 1..222: note = Amino acid sequence

SEQ ID NO: 4555 - protein, 225 aa, synthetic construct; identical to SEQ ID NO: 14
  REGION 1..225: note = Amino acid sequence

SEQ ID NO: 4556 - protein, 222 aa, synthetic construct; identical to SEQ ID NO: 15
  REGION 1..222: note = Amino acid sequence

SEQ ID NO: 4557 - protein, 216 aa, synthetic construct; identical to SEQ ID NO: 16
  REGION 1..216: note = Amino acid sequence

SEQ ID NO: 4558 - protein, 218 aa, synthetic construct; identical to SEQ ID NO: 17
  REGION 1..218: note = Amino acid sequence

SEQ ID NO: 4559 - protein, 222 aa, synthetic construct; identical to SEQ ID NO: 18
  REGION 1..222: note = Amino acid sequence

SEQ ID NO: 4560 - protein, 219 aa, synthetic construct; identical to SEQ ID NO: 19
  REGION 1..219: note = Amino acid sequence

SEQ ID NO: 4561 - protein, 216 aa, synthetic construct; identical to SEQ ID NO: 20
  REGION 1..216: note = Amino acid sequence

SEQ ID NO: 4562 - protein, 223 aa, synthetic construct; identical to SEQ ID NO: 21
  REGION 1..223: note = Amino acid sequence

SEQ ID NO: 4563 - protein, 115 aa, synthetic construct; identical to SEQ ID NO: 22
  REGION 1..115: note = Amino acid sequence

SEQ ID NO: 4564 - protein, 215 aa, synthetic construct; identical to SEQ ID NO: 23
  REGION 1..215: note = Amino acid sequence

SEQ ID NO: 4565 - protein, 213 aa, synthetic construct; identical to SEQ ID NO: 24
  REGION 1..213: note = Amino acid sequence

SEQ ID NO: 4566 - protein, 220 aa, synthetic construct; identical to SEQ ID NO: 25
  REGION 1..220: note = Amino acid sequence

SEQ ID NO: 4567 - protein, 221 aa, synthetic construct; identical to SEQ ID NO: 26
  REGION 1..221: note = Amino acid sequence

SEQ ID NO: 4568 - protein, 222 aa, synthetic construct; identical to SEQ ID NO: 27
  REGION 1..222: note = Amino acid sequence

SEQ ID NO: 4569 - protein, 119 aa, synthetic construct; identical to SEQ ID NO: 28
  REGION 1..119: note = Amino acid sequence

SEQ ID NO: 4570 - protein, 219 aa, synthetic construct; identical to SEQ ID NO: 29
  REGION 1..219: note = Amino acid sequence

SEQ ID NO: 4571 - protein, 216 aa, synthetic construct; identical to SEQ ID NO: 30
  REGION 1..216: note = Amino acid sequence

SEQ ID NO: 4572 - protein, 222 aa, synthetic construct; identical to SEQ ID NO: 31
  REGION 1..222: note = Amino acid sequence

SEQ ID NO: 4573 - protein, 226 aa, synthetic construct; identical to SEQ ID NO: 32
  REGION 1..226: note = Amino acid sequence

SEQ ID NO: 4574 - protein, 218 aa, synthetic construct; identical to SEQ ID NO: 33
  REGION 1..218: note = Amino acid sequence

SEQ ID NO: 4575 - protein, 121 aa, synthetic construct; identical to SEQ ID NO: 34
  REGION 1..121: note = Amino acid sequence

SEQ ID NO: 4576 - protein, 219 aa, synthetic construct; identical to SEQ ID NO: 35
  REGION 1..219: note = Amino acid sequence

SEQ ID NO: 4577 - protein, 218 aa, synthetic construct; identical to SEQ ID NO: 36
  REGION 1..218: note = Amino acid sequence

SEQ ID NO: 4578 - protein, 215 aa, synthetic construct; identical to SEQ ID NO: 37
  REGION 1..215: note = Amino acid sequence

SEQ ID NO: 4579 - protein, 220 aa, synthetic construct; identical to SEQ ID NO: 38
  REGION 1..220: note = Amino acid sequence

SEQ ID NO: 4580 - protein, 220 aa, synthetic construct; identical to SEQ ID NO: 39
  REGION 1..220: note = Amino acid sequence

SEQ ID NO: 4581 - protein, 216 aa, synthetic construct; identical to SEQ ID NO: 40
  REGION 1..216: note = Amino acid sequence

SEQ ID NO: 4582 - protein, 223 aa, synthetic construct; identical to SEQ ID NO: 41
  REGION 1..223: note = Amino acid sequence

SEQ ID NO: 4583 - protein, 221 aa, synthetic construct; identical to SEQ ID NO: 42
  REGION 1..221: note = Amino acid sequence

SEQ ID NO: 4584 - protein, 223 aa, synthetic construct; identical to SEQ ID NO: 43
  REGION 1..223: note = Amino acid sequence

SEQ ID NO: 4585 - protein, 123 aa, synthetic construct; identical to SEQ ID NO: 44
  REGION 1..123: note = Amino acid sequence

SEQ ID NO: 4586 - protein, 118 aa, synthetic construct; identical to SEQ ID NO: 45
  REGION 1..118: note = Amino acid sequence

SEQ ID NO: 4587 - protein, 229 aa, synthetic construct; identical to SEQ ID NO: 46
  REGION 1..229: note = Amino acid sequence

SEQ ID NO: 4588 - protein, 221 aa, synthetic construct; identical to SEQ ID NO: 47
  REGION 1..221: note = Amino acid sequence

SEQ ID NO: 4589 - protein, 217 aa, synthetic construct; identical to SEQ ID NO: 48
  REGION 1..217: note = Amino acid sequence

SEQ ID NO: 4590 - protein, 218 aa, synthetic construct; identical to SEQ ID NO: 49
  REGION 1..218: note = Amino acid sequence

SEQ ID NO: 4591 - protein, 226 aa, synthetic construct; identical to SEQ ID NO: 50
  REGION 1..226: note = Amino acid sequence

SEQ ID NO: 4592 - protein, 216 aa, synthetic construct; identical to SEQ ID NO: 51
  REGION 1..216: note = Amino acid sequence

SEQ ID NO: 4593 - protein, 221 aa, synthetic construct; identical to SEQ ID NO: 52
  REGION 1..221: note = Amino acid sequence

SEQ ID NO: 4594 - protein, 117 aa, synthetic construct; identical to SEQ ID NO: 53
  REGION 1..117: note = Amino acid sequence

SEQ ID NO: 4595 - protein, 224 aa, synthetic construct; identical to SEQ ID NO: 54
  REGION 1..224: note = Amino acid sequence

SEQ ID NO: 4596 - protein, 218 aa, synthetic construct; identical to SEQ ID NO: 55
  REGION 1..218: note = Amino acid sequence

SEQ ID NO: 4597 - protein, 124 aa, synthetic construct; identical to SEQ ID NO: 56
  REGION 1..124: note = Amino acid sequence

SEQ ID NO: 4598 - protein, 224 aa, synthetic construct; identical to SEQ ID NO: 57
  REGION 1..224: note = Amino acid sequence

SEQ ID NO: 4599 - protein, 215 aa, synthetic construct; identical to SEQ ID NO: 58
  REGION 1..215: note = Amino acid sequence

SEQ ID NO: 4600 - protein, 218 aa, synthetic construct; identical to SEQ ID NO: 59
  REGION 1..218: note = Amino acid sequence

SEQ ID NO: 4601 - protein, 218 aa, synthetic construct; identical to SEQ ID NO: 60
  REGION 1..218: note = Amino acid sequence

SEQ ID NO: 4602 - protein, 221 aa, synthetic construct; identical to SEQ ID NO: 61
  REGION 1..221: note = Amino acid sequence

SEQ ID NO: 4603 - protein, 223 aa, synthetic construct; identical to SEQ ID NO: 62
  REGION 1..223: note = Amino acid sequence

SEQ ID NO: 4604 - protein, 218 aa, synthetic construct; identical to SEQ ID NO: 63
  REGION 1..218: note = Amino acid sequence

SEQ ID NO: 4605 - protein, 224 aa, synthetic construct; identical to SEQ ID NO: 64
  REGION 1..224: note = Amino acid sequence

SEQ ID NO: 4606 - protein, 218 aa, synthetic construct; identical to SEQ ID NO: 65
  REGION 1..218: note = Amino acid sequence

SEQ ID NO: 4607 - protein, 218 aa, synthetic construct; identical to SEQ ID NO: 66
  REGION 1..218: note = Amino acid sequence

SEQ ID NO: 4608 - protein, 212 aa, synthetic construct; identical to SEQ ID NO: 67
  REGION 1..212: note = Amino acid sequence

SEQ ID NO: 4609 - protein, 220 aa, synthetic construct; identical to SEQ ID NO: 68
  REGION 1..220: note = Amino acid sequence

SEQ ID NO: 4610 - protein, 220 aa, synthetic construct; identical to SEQ ID NO: 69
  REGION 1..220: note = Amino acid sequence

SEQ ID NO: 4611 - protein, 222 aa, synthetic construct; identical to SEQ ID NO: 70
  REGION 1..222: note = Amino acid sequence

SEQ ID NO: 4612 - protein, 222 aa, synthetic construct; identical to SEQ ID NO: 71
  REGION 1..222: note = Amino acid sequence

SEQ ID NO: 4613 - protein, 223 aa, synthetic construct; identical to SEQ ID NO: 72
  REGION 1..223: note = Amino acid sequence

SEQ ID NO: 4614 - protein, 119 aa, synthetic construct; identical to SEQ ID NO: 73
  REGION 1..119: note = Amino acid sequence

SEQ ID NO: 4615 - protein, 218 aa, synthetic construct; identical to SEQ ID NO: 74
  REGION 1..218: note = Amino acid sequence

SEQ ID NO: 4616 - protein, 216 aa, synthetic construct; identical to SEQ ID NO: 75
  REGION 1..216: note = Amino acid sequence

SEQ ID NO: 4617 - protein, 226 aa, synthetic construct; identical to SEQ ID NO: 76
  REGION 1..226: note = Amino acid sequence

SEQ ID NO: 4618 - protein, 224 aa, synthetic construct; identical to SEQ ID NO: 77
  REGION 1..224: note = Amino acid sequence

SEQ ID NO: 4619 - protein, 222 aa, synthetic construct; identical to SEQ ID NO: 78
  REGION 1..222: note = Amino acid sequence

SEQ ID NO: 4620 - protein, 227 aa, synthetic construct; identical to SEQ ID NO: 79
  REGION 1..227: note = Amino acid sequence

SEQ ID NO: 4621 - protein, 221 aa, synthetic construct; identical to SEQ ID NO: 80
  REGION 1..221: note = Amino acid sequence

SEQ ID NO: 4622 - protein, 222 aa, synthetic construct; identical to SEQ ID NO: 81
  REGION 1..222: note = Amino acid sequence

SEQ ID NO: 4623 - protein, 217 aa, synthetic construct; identical to SEQ ID NO: 82
  REGION 1..217: note = Amino acid sequence

SEQ ID NO: 4624 - protein, 221 aa, synthetic construct; identical to SEQ ID NO: 83
  REGION 1..221: note = Amino acid sequence

SEQ ID NO: 4625 - protein, 218 aa, synthetic construct; identical to SEQ ID NO: 84
  REGION 1..218: note = Amino acid sequence

SEQ ID NO: 4626 - protein, 219 aa, synthetic construct; identical to SEQ ID NO: 85
  REGION 1..219: note = Amino acid sequence

SEQ ID NO: 4627 - protein, 212 aa, synthetic construct; identical to SEQ ID NO: 86
  REGION 1..212: note = Amino acid sequence

SEQ ID NO: 4628 - protein, 120 aa, synthetic construct; identical to SEQ ID NO: 87
  REGION 1..120: note = Amino acid sequence

SEQ ID NO: 4629 - protein, 219 aa, synthetic construct; identical to SEQ ID NO: 88
  REGION 1..219: note = Amino acid sequence

SEQ ID NO: 4630 - protein, 228 aa, synthetic construct; identical to SEQ ID NO: 89
  REGION 1..228: note = Amino acid sequence

SEQ ID NO: 4631 - protein, 218 aa, synthetic construct; identical to SEQ ID NO: 90
  REGION 1..218: note = Amino acid sequence

SEQ ID NO: 4632 - protein, 226 aa, synthetic construct; identical to SEQ ID NO: 91
  REGION 1..226: note = Amino acid sequence

SEQ ID NO: 4633 - protein, 219 aa, synthetic construct; identical to SEQ ID NO: 92
  REGION 1..219: note = Amino acid sequence

SEQ ID NO: 4634 - protein, 222 aa, synthetic construct; identical to SEQ ID NO: 93
  REGION 1..222: note = Amino acid sequence

SEQ ID NO: 4635 - protein, 221 aa, synthetic construct; identical to SEQ ID NO: 94
  REGION 1..221: note = Amino acid sequence

SEQ ID NO: 4636 - protein, 226 aa, synthetic construct; identical to SEQ ID NO: 91
  REGION 1..226: note = Amino acid sequence

SEQ ID NO: 4637 - protein, 121 aa, synthetic construct; identical to SEQ ID NO: 96
  REGION 1..121: note = Amino acid sequence

SEQ ID NO: 4638 - protein, 222 aa, synthetic construct; identical to SEQ ID NO: 97
  REGION 1..222: note = Amino acid sequence

SEQ ID NO: 4639 - protein, 215 aa, synthetic construct; identical to SEQ ID NO: 98
  REGION 1..215: note = Amino acid sequence

SEQ ID NO: 4640 - protein, 221 aa, synthetic construct; identical to SEQ ID NO: 99
  REGION 1..221: note = Amino acid sequence

SEQ ID NO: 4641 - protein, 218 aa, synthetic construct; identical to SEQ ID NO: 100
  REGION 1..218: note = Amino acid sequence

SEQ ID NO: 4642 - protein, 218 aa, synthetic construct; identical to SEQ ID NO: 101
  REGION 1..218: note = Amino acid sequence

SEQ ID NO: 4643 - protein, 219 aa, synthetic construct; identical to SEQ ID NO: 102
  REGION 1..219: note = Amino acid sequence

SEQ ID NO: 4644 - protein, 218 aa, synthetic construct; identical to SEQ ID NO: 103
  REGION 1..218: note = Amino acid sequence

SEQ ID NO: 4645 - protein, 219 aa, synthetic construct; identical to SEQ ID NO: 104
  REGION 1..219: note = Amino acid sequence

SEQ ID NO: 4646 - protein, 123 aa, synthetic construct; identical to SEQ ID NO: 105
  REGION 1..123: note = Amino acid sequence

SEQ ID NO: 4647 - protein, 218 aa, synthetic construct; identical to SEQ ID NO: 106
  REGION 1..218: note = Amino acid sequence

SEQ ID NO: 4648 - protein, 225 aa, synthetic construct; identical to SEQ ID NO: 107
  REGION 1..225: note = Amino acid sequence

SEQ ID NO: 4649 - protein, 225 aa, synthetic construct; identical to SEQ ID NO: 108
  REGION 1..225: note = Amino acid sequence

SEQ ID NO: 4650 - protein, 218 aa, synthetic construct; identical to SEQ ID NO: 109
  REGION 1..218: note = Amino acid sequence

SEQ ID NO: 4651 - protein, 222 aa, synthetic construct; identical to SEQ ID NO: 110
  REGION 1..222: note = Amino acid sequence

SEQ ID NO: 4652 - protein, 116 aa, synthetic construct; identical to SEQ ID NO: 111
  REGION 1..116: note = Amino acid sequence

SEQ ID NO: 4653 - protein, 230 aa, synthetic construct; identical to SEQ ID NO: 112
  REGION 1..230: note = Amino acid sequence

SEQ ID NO: 4654 - protein, 223 aa, synthetic construct; identical to SEQ ID NO: 113
  REGION 1..223: note = Amino acid sequence

SEQ ID NO: 4655 - protein, 224 aa, synthetic construct; identical to SEQ ID NO: 114
  REGION 1..224: note = Amino acid sequence

SEQ ID NO: 4656 - protein, 215 aa, synthetic construct; identical to SEQ ID NO: 115
  REGION 1..215: note = Amino acid sequence

SEQ ID NO: 4657 - protein, 218 aa, synthetic construct; identical to SEQ ID NO: 116
  REGION 1..218: note = Amino acid sequence

SEQ ID NO: 4658 - protein, 222 aa, synthetic construct; identical to SEQ ID NO: 117
  REGION 1..222: note = Amino acid sequence

SEQ ID NO: 4659 - protein, 220 aa, synthetic construct; identical to SEQ ID NO: 118
  REGION 1..220: note = Amino acid sequence

SEQ ID NO: 4660 - protein, 125 aa, synthetic construct; identical to SEQ ID NO: 119
  REGION 1..125: note = Amino acid sequence

SEQ ID NO: 4661 - protein, 125 aa, synthetic construct; identical to SEQ ID NO: 120
  REGION 1..125: note = Amino acid sequence

SEQ ID NO: 4662 - protein, 214 aa, synthetic construct; identical to SEQ ID NO: 121
  REGION 1..214: note = Amino acid sequence

SEQ ID NO: 4663 - protein, 223 aa, synthetic construct; identical to SEQ ID NO: 122
  REGION 1..223: note = Amino acid sequence

SEQ ID NO: 4664 - protein, 219 aa, synthetic construct; identical to SEQ ID NO: 123
  REGION 1..219: note = Amino acid sequence

SEQ ID NO: 4665 - protein, 218 aa, synthetic construct; identical to SEQ ID NO: 124
  REGION 1..218: note = Amino acid sequence

SEQ ID NO: 4666 - protein, 218 aa, synthetic construct; identical to SEQ ID NO: 125
  REGION 1..218: note = Amino acid sequence

SEQ ID NO: 4667 - protein, 218 aa, synthetic construct; identical to SEQ ID NO: 126
  REGION 1..218: note = Amino acid sequence

SEQ ID NO: 4668 - protein, 220 aa, synthetic construct; identical to SEQ ID NO: 127
  REGION 1..220: note = Amino acid sequence

SEQ ID NO: 4669 - protein, 221 aa, synthetic construct; identical to SEQ ID NO: 128
  REGION 1..221: note = Amino acid sequence

SEQ ID NO: 4670 - protein, 216 aa, synthetic construct; identical to SEQ ID NO: 129
  REGION 1..216: note = Amino acid sequence

SEQ ID NO: 4671 - protein, 224 aa, synthetic construct; identical to SEQ ID NO: 130
  REGION 1..224: note = Amino acid sequence

SEQ ID NO: 4672 - protein, 116 aa, synthetic construct; identical to SEQ ID NO: 131
  REGION 1..116: note = Amino acid sequence

SEQ ID NO: 4673 - protein, 218 aa, synthetic construct; identical to SEQ ID NO: 132
  REGION 1..218: note = Amino acid sequence

SEQ ID NO: 4674 - protein, 222 aa, synthetic construct; identical to SEQ ID NO: 133
  REGION 1..222: note = Amino acid sequence

SEQ ID NO: 4675 - protein, 219 aa, synthetic construct; identical to SEQ ID NO: 134
  REGION 1..219: note = Amino acid sequence

SEQ ID NO: 4676 - protein, 223 aa, synthetic construct; identical to SEQ ID NO: 135
  REGION 1..223: note = Amino acid sequence

SEQ ID NO: 4677 - protein, 117 aa, synthetic construct; identical to SEQ ID NO: 136
  REGION 1..117: note = Amino acid sequence

SEQ ID NO: 4678 - protein, 221 aa, synthetic construct; identical to SEQ ID NO: 137
  REGION 1..221: note = Amino acid sequence

SEQ ID NO: 4679 - protein, 118 aa, synthetic construct; identical to SEQ ID NO: 138
  REGION 1..118: note = Amino acid sequence

SEQ ID NO: 4680 - protein, 121 aa, synthetic construct; identical to SEQ ID NO: 139
  REGION 1..121: note = Amino acid sequence

SEQ ID NO: 4681 - protein, 128 aa, synthetic construct; identical to SEQ ID NO: 140
  REGION 1..128: note = Amino acid sequence

SEQ ID NO: 4682 - protein, 216 aa, synthetic construct; identical to SEQ ID NO: 141
  REGION 1..216: note = Amino acid sequence

SEQ ID NO: 4683 - protein, 218 aa, synthetic construct; identical to SEQ ID NO: 142
  REGION 1..218: note = Amino acid sequence

SEQ ID NO: 4684 - protein, 219 aa, synthetic construct; identical to SEQ ID NO: 143
  REGION 1..219: note = Amino acid sequence

SEQ ID NO: 4685 - protein, 217 aa, synthetic construct; identical to SEQ ID NO: 144
  REGION 1..217: note = Amino acid sequence

SEQ ID NO: 4686 - protein, 224 aa, synthetic construct; identical to SEQ ID NO: 145
  REGION 1..224: note = Amino acid sequence

SEQ ID NO: 4687 - protein, 121 aa, synthetic construct; identical to SEQ ID NO: 146
  REGION 1..121: note = Amino acid sequence

SEQ ID NO: 4688 - protein, 214 aa, synthetic construct; identical to SEQ ID NO: 147
  REGION 1..214: note = Amino acid sequence

SEQ ID NO: 4689 - protein, 225 aa, synthetic construct; identical to SEQ ID NO: 148
  REGION 1..225: note = Amino acid sequence

SEQ ID NO: 4690 - protein, 120 aa, synthetic construct; identical to SEQ ID NO: 149
  REGION 1..120: note = Amino acid sequence

SEQ ID NO: 4691 - protein, 221 aa, synthetic construct; identical to SEQ ID NO: 150
  REGION 1..221: note = Amino acid sequence

SEQ ID NO: 4692 - protein, 217 aa, synthetic construct; identical to SEQ ID NO: 151
  REGION 1..217: note = Amino acid sequence

SEQ ID NO: 4693 - protein, 218 aa, synthetic construct; identical to SEQ ID NO: 152
  REGION 1..218: note = Amino acid sequence

SEQ ID NO: 4694 - protein, 217 aa, synthetic construct; identical to SEQ ID NO: 153
  REGION 1..217: note = Amino acid sequence

SEQ ID NO: 4695 - protein, 222 aa, synthetic construct; identical to SEQ ID NO: 154
  REGION 1..222: note = Amino acid sequence

SEQ ID NO: 4696 - protein, 213 aa, synthetic construct; identical to SEQ ID NO: 155
  REGION 1..213: note = Amino acid sequence

SEQ ID NO: 4697 - protein, 222 aa, synthetic construct; identical to SEQ ID NO: 156
  REGION 1..222: note = Amino acid sequence

SEQ ID NO: 4698 - protein, 227 aa, synthetic construct; identical to SEQ ID NO: 157
  REGION 1..227: note = Amino acid sequence

SEQ ID NO: 4699 - protein, 123 aa, synthetic construct; identical to SEQ ID NO: 158
  REGION 1..123: note = Amino acid sequence

SEQ ID NO: 4700 - protein, 214 aa, synthetic construct; identical to SEQ ID NO: 159
  REGION 1..214: note = Amino acid sequence

SEQ ID NO: 4701 - protein, 218 aa, synthetic construct; identical to SEQ ID NO: 160
  REGION 1..218: note = Amino acid sequence

SEQ ID NO: 4702 - protein, 219 aa, synthetic construct; identical to SEQ ID NO: 161
  REGION 1..219: note = Amino acid sequence

SEQ ID NO: 4703 - protein, 223 aa, synthetic construct; identical to SEQ ID NO: 162
  REGION 1..223: note = Amino acid sequence

SEQ ID NO: 4704 - protein, 217 aa, synthetic construct; identical to SEQ ID NO: 163
  REGION 1..217: note = Amino acid sequence

SEQ ID NO: 4705 - protein, 220 aa, synthetic construct; identical to SEQ ID NO: 164
  REGION 1..220: note = Amino acid sequence

SEQ ID NO: 4706 - protein, 231 aa, synthetic construct; identical to SEQ ID NO: 165
  REGION 1..231: note = Amino acid sequence

SEQ ID NO: 4707 - protein, 222 aa, synthetic construct; identical to SEQ ID NO: 166
  REGION 1..222: note = Amino acid sequence

SEQ ID NO: 4708 - protein, 222 aa, synthetic construct; identical to SEQ ID NO: 167
  REGION 1..222: note = Amino acid sequence

SEQ ID NO: 4709 - protein, 224 aa, synthetic construct; identical to SEQ ID NO: 168
  REGION 1..224: note = Amino acid sequence

SEQ ID NO: 4710 - protein, 219 aa, synthetic construct; identical to SEQ ID NO: 169
  REGION 1..219: note = Amino acid sequence

SEQ ID NO: 4711 - protein, 224 aa, synthetic construct; identical to SEQ ID NO: 170
  REGION 1..224: note = Amino acid sequence

SEQ ID NO: 4712 - protein, 217 aa, synthetic construct; identical to SEQ ID NO: 171
  REGION 1..217: note = Amino acid sequence

SEQ ID NO: 4713 - protein, 224 aa, synthetic construct; identical to SEQ ID NO: 172
  REGION 1..224: note = Amino acid sequence

SEQ ID NO: 4714 - protein, 217 aa, synthetic construct; identical to SEQ ID NO: 173
  REGION 1..217: note = Amino acid sequence

SEQ ID NO: 4715 - protein, 226 aa, synthetic construct; identical to SEQ ID NO: 174
  REGION 1..226: note = Amino acid sequence

SEQ ID NO: 4716 - protein, 220 aa, synthetic construct; identical to SEQ ID NO: 175
  REGION 1..220: note = Amino acid sequence

SEQ ID NO: 4717 - protein, 220 aa, synthetic construct; identical to SEQ ID NO: 176
  REGION 1..220: note = Amino acid sequence

SEQ ID NO: 4718 - protein, 224 aa, synthetic construct; identical to SEQ ID NO: 177
  REGION 1..224: note = Amino acid sequence

SEQ ID NO: 4719 - protein, 222 aa, synthetic construct; identical to SEQ ID NO: 178
  REGION 1..222: note = Amino acid sequence

SEQ ID NO: 4720 - protein, 223 aa, synthetic construct; identical to SEQ ID NO: 179
  REGION 1..223: note = Amino acid sequence

SEQ ID NO: 4721 - protein, 217 aa, synthetic construct; identical to SEQ ID NO: 180
  REGION 1..217: note = Amino acid sequence

SEQ ID NO: 4722 - protein, 220 aa, synthetic construct; identical to SEQ ID NO: 181
  REGION 1..220: note = Amino acid sequence

SEQ ID NO: 4723 - protein, 219 aa, synthetic construct; identical to SEQ ID NO: 182
  REGION 1..219: note = Amino acid sequence

SEQ ID NO: 4724 - protein, 219 aa, synthetic construct; identical to SEQ ID NO: 183
  REGION 1..219: note = Amino acid sequence

SEQ ID NO: 4725 - protein, 217 aa, synthetic construct; identical to SEQ ID NO: 184
  REGION 1..217: note = Amino acid sequence

SEQ ID NO: 4726 - protein, 217 aa, synthetic construct; identical to SEQ ID NO: 185
  REGION 1..217: note = Amino acid sequence

SEQ ID NO: 4727 - protein, 215 aa, synthetic construct; identical to SEQ ID NO: 186
  REGION 1..215: note = Amino acid sequence

SEQ ID NO: 4728 - protein, 221 aa, synthetic construct; identical to SEQ ID NO: 187
  REGION 1..221: note = Amino acid sequence

SEQ ID NO: 4729 - protein, 220 aa, synthetic construct; identical to SEQ ID NO: 188
  REGION 1..220: note = Amino acid sequence

SEQ ID NO: 4730 - protein, 219 aa, synthetic construct; identical to SEQ ID NO: 189
  REGION 1..219: note = Amino acid sequence

SEQ ID NO: 4731 - protein, 217 aa, synthetic construct; identical to SEQ ID NO: 190
  REGION 1..217: note = Amino acid sequence

SEQ ID NO: 4732 - protein, 229 aa, synthetic construct; identical to SEQ ID NO: 191
  REGION 1..229: note = Amino acid sequence

SEQ ID NO: 4733 - protein, 217 aa, synthetic construct; identical to SEQ ID NO: 192
  REGION 1..217: note = Amino acid sequence

SEQ ID NO: 4734 - protein, 220 aa, synthetic construct; identical to SEQ ID NO: 193
  REGION 1..220: note = Amino acid sequence

SEQ ID NO: 4735 - protein, 216 aa, synthetic construct; identical to SEQ ID NO: 194
  REGION 1..216: note = Amino acid sequence

SEQ ID NO: 4736 - protein, 116 aa, synthetic construct; identical to SEQ ID NO: 195
  REGION 1..116: note = Amino acid sequence

SEQ ID NO: 4737 - protein, 223 aa, synthetic construct; identical to SEQ ID NO: 196
  REGION 1..223: note = Amino acid sequence

SEQ ID NO: 4738 - protein, 117 aa, synthetic construct; identical to SEQ ID NO: 197
  REGION 1..117: note = Amino acid sequence

SEQ ID NO: 4739 - protein, 117 aa, synthetic construct; identical to SEQ ID NO: 198
  REGION 1..117: note = Amino acid sequence

SEQ ID NO: 4740 - protein, 223 aa, synthetic construct; identical to SEQ ID NO: 199
  REGION 1..223: note = Amino acid sequence

SEQ ID NO: 4741 - protein, 121 aa, synthetic construct; identical to SEQ ID NO: 200
  REGION 1..121: note = Amino acid sequence

SEQ ID NO: 4742 - protein, 115 aa, synthetic construct; identical to SEQ ID NO: 201
  REGION 1..115: note = Amino acid sequence

SEQ ID NO: 4743 - protein, 216 aa, synthetic construct; identical to SEQ ID NO: 202
  REGION 1..216: note = Amino acid sequence

SEQ ID NO: 4744 - protein, 219 aa, synthetic construct; identical to SEQ ID NO: 203
  REGION 1..219: note = Amino acid sequence

SEQ ID NO: 4745 - protein, 225 aa, synthetic construct; identical to SEQ ID NO: 204
  REGION 1..225: note = Amino acid sequence

SEQ ID NO: 4746 - protein, 223 aa, synthetic construct; identical to SEQ ID NO: 205
  REGION 1..223: note = Amino acid sequence

SEQ ID NO: 4747 - protein, 223 aa, synthetic construct; identical to SEQ ID NO: 206
  REGION 1..223: note = Amino acid sequence

SEQ ID NO: 4748 - protein, 223 aa, synthetic construct; identical to SEQ ID NO: 207
  REGION 1..223: note = Amino acid sequence

SEQ ID NO: 4749 - protein, 224 aa, synthetic construct; identical to SEQ ID NO: 208
  REGION 1..224: note = Amino acid sequence

SEQ ID NO: 4750 - protein, 226 aa, synthetic construct; identical to SEQ ID NO: 209
  REGION 1..226: note = Amino acid sequence

SEQ ID NO: 4751 - protein, 217 aa, synthetic construct; identical to SEQ ID NO: 210
  REGION 1..217: note = Amino acid sequence

SEQ ID NO: 4752 - protein, 218 aa, synthetic construct; identical to SEQ ID NO: 211
  REGION 1..218: note = Amino acid sequence

SEQ ID NO: 4753 - protein, 219 aa, synthetic construct; identical to SEQ ID NO: 212
  REGION 1..219: note = Amino acid sequence

SEQ ID NO: 4754 - protein, 226 aa, synthetic construct; identical to SEQ ID NO: 213
  REGION 1..226: note = Amino acid sequence

SEQ ID NO: 4755 - protein, 224 aa, synthetic construct; identical to SEQ ID NO: 214
  REGION 1..224: note = Amino acid sequence

SEQ ID NO: 4756 - protein, 223 aa, synthetic construct; identical to SEQ ID NO: 215
  REGION 1..223: note = Amino acid sequence

SEQ ID NO: 4757 - protein, 216 aa, synthetic construct; identical to SEQ ID NO: 216
  REGION 1..216: note = Amino acid sequence

SEQ ID NO: 4758 - protein, 220 aa, synthetic construct; identical to SEQ ID NO: 217
  REGION 1..220: note = Amino acid sequence

SEQ ID NO: 4759 - protein, 120 aa, synthetic construct; identical to SEQ ID NO: 218
  REGION 1..120: note = Amino acid sequence

SEQ ID NO: 4760 - protein, 121 aa, synthetic construct; identical to SEQ ID NO: 219
  REGION 1..121: note = Amino acid sequence

SEQ ID NO: 4761 - protein, 223 aa, synthetic construct; identical to SEQ ID NO: 220
  REGION 1..223: note = Amino acid sequence

SEQ ID NO: 4762 - protein, 226 aa, synthetic construct; identical to SEQ ID NO: 221
  REGION 1..226: note = Amino acid sequence

SEQ ID NO: 4763 - protein, 119 aa, synthetic construct; identical to SEQ ID NO: 222
  REGION 1..119: note = Amino acid sequence

SEQ ID NO: 4764 - protein, 117 aa, synthetic construct; identical to SEQ ID NO: 223
  REGION 1..117: note = Amino acid sequence

SEQ ID NO: 4765 - protein, 219 aa, synthetic construct; identical to SEQ ID NO: 224
  REGION 1..219: note = Amino acid sequence

SEQ ID NO: 4766 - protein, 120 aa, synthetic construct; identical to SEQ ID NO: 225
  REGION 1..120: note = Amino acid sequence

SEQ ID NO: 4767 - protein, 117 aa, synthetic construct; identical to SEQ ID NO: 226
  REGION 1..117: note = Amino acid sequence

SEQ ID NO: 4768 - protein, 221 aa, synthetic construct; identical to SEQ ID NO: 227
  REGION 1..221: note = Amino acid sequence

SEQ ID NO: 4769 - protein, 117 aa, synthetic construct; identical to SEQ ID NO: 228
  REGION 1..117: note = Amino acid sequence

SEQ ID NO: 4770 - protein, 221 aa, synthetic construct; identical to SEQ ID NO: 229
  REGION 1..221: note = Amino acid sequence

SEQ ID NO: 4771 - protein, 227 aa, synthetic construct; identical to SEQ ID NO: 230
  REGION 1..227: note = Amino acid sequence

SEQ ID NO: 4772 - protein, 218 aa, synthetic construct; identical to SEQ ID NO: 231
  REGION 1..218: note = Amino acid sequence

SEQ ID NO: 4773 - protein, 215 aa, synthetic construct; identical to SEQ ID NO: 232
  REGION 1..215: note = Amino acid sequence

SEQ ID NO: 4774 - protein, 219 aa, synthetic construct; identical to SEQ ID NO: 233
  REGION 1..219: note = Amino acid sequence

SEQ ID NO: 4775 - protein, 123 aa, synthetic construct; identical to SEQ ID NO: 234
  REGION 1..123: note = Amino acid sequence

SEQ ID NO: 4776 - protein, 224 aa, synthetic construct; identical to SEQ ID NO: 235
  REGION 1..224: note = Amino acid sequence

SEQ ID NO: 4777 - protein, 220 aa, synthetic construct; identical to SEQ ID NO: 236
  REGION 1..220: note = Amino acid sequence

SEQ ID NO: 4778 - protein, 219 aa, synthetic construct; identical to SEQ ID NO: 237
  REGION 1..219: note = Amino acid sequence

SEQ ID NO: 4779 - protein, 219 aa, synthetic construct; identical to SEQ ID NO: 238
  REGION 1..219: note = Amino acid sequence

SEQ ID NO: 4780 - protein, 221 aa, synthetic construct; identical to SEQ ID NO: 239
  REGION 1..221: note = Amino acid sequence

SEQ ID NO: 4781 - protein, 218 aa, synthetic construct; identical to SEQ ID NO: 240
  REGION 1..218: note = Amino acid sequence

SEQ ID NO: 4782 - protein, 219 aa, synthetic construct; identical to SEQ ID NO: 241
  REGION 1..219: note = Amino acid sequence

SEQ ID NO: 4783 - protein, 120 aa, synthetic construct; identical to SEQ ID NO: 242
  REGION 1..120: note = Amino acid sequence

SEQ ID NO: 4784 - protein, 218 aa, synthetic construct; identical to SEQ ID NO: 243
  REGION 1..218: note = Amino acid sequence

SEQ ID NO: 4785 - protein, 219 aa, synthetic construct; identical to SEQ ID NO: 244
  REGION 1..219: note = Amino acid sequence

SEQ ID NO: 4786 - protein, 221 aa, synthetic construct; identical to SEQ ID NO: 245
  REGION 1..221: note = Amino acid sequence

SEQ ID NO: 4787 - protein, 116 aa, synthetic construct; identical to SEQ ID NO: 246
  REGION 1..116: note = Amino acid sequence

SEQ ID NO: 4788 - protein, 223 aa, synthetic construct; identical to SEQ ID NO: 247
  REGION 1..223: note = Amino acid sequence

SEQ ID NO: 4789 - protein, 217 aa, synthetic construct; identical to SEQ ID NO: 248
  REGION 1..217: note = Amino acid sequence

SEQ ID NO: 4790 - protein, 219 aa, synthetic construct; identical to SEQ ID NO: 249
  REGION 1..219: note = Amino acid sequence

SEQ ID NO: 4791 - protein, 216 aa, synthetic construct; identical to SEQ ID NO: 250
  REGION 1..216: note = Amino acid sequence

SEQ ID NO: 4792 - protein, 226 aa, synthetic construct; identical to SEQ ID NO: 251
  REGION 1..226: note = Amino acid sequence

SEQ ID NO: 4793 - protein, 218 aa, synthetic construct; identical to SEQ ID NO: 252
  REGION 1..218: note = Amino acid sequence

SEQ ID NO: 4794 - protein, 125 aa, synthetic construct; identical to SEQ ID NO: 253
  REGION 1..125: note = Amino acid sequence

SEQ ID NO: 4795 - protein, 113 aa, synthetic construct; identical to SEQ ID NO: 254
  REGION 1..113: note = Amino acid sequence

SEQ ID NO: 4796 - protein, 226 aa, synthetic construct; identical to SEQ ID NO: 255
  REGION 1..226: note = Amino acid sequence

SEQ ID NO: 4797 - protein, 219 aa, synthetic construct; identical to SEQ ID NO: 256
  REGION 1..219: note = Amino acid sequence

SEQ ID NO: 4798 - protein, 216 aa, synthetic construct; identical to SEQ ID NO: 257
  REGION 1..216: note = Amino acid sequence

SEQ ID NO: 4799 - protein, 121 aa, synthetic construct; identical to SEQ ID NO: 258
  REGION 1..121: note = Amino acid sequence

SEQ ID NO: 4800 - protein, 216 aa, synthetic construct; identical to SEQ ID NO: 259
  REGION 1..216: note = Amino acid sequence

SEQ ID NO: 4801 - protein, 220 aa, synthetic construct; identical to SEQ ID NO: 260
  REGION 1..220: note = Amino acid sequence

SEQ ID NO: 4802 - protein, 213 aa, synthetic construct; identical to SEQ ID NO: 261
  REGION 1..213: note = Amino acid sequence

SEQ ID NO: 4803 - protein, 217 aa, synthetic construct; identical to SEQ ID NO: 262
  REGION 1..217: note = Amino acid sequence

SEQ ID NO: 4804 - protein, 217 aa, synthetic construct; identical to SEQ ID NO: 263
  REGION 1..217: note = Amino acid sequence

SEQ ID NO: 4805 - protein, 225 aa, synthetic construct; identical to SEQ ID NO: 264
  REGION 1..225: note = Amino acid sequence

SEQ ID NO: 4806 - protein, 211 aa, synthetic construct; identical to SEQ ID NO: 265
  REGION 1..211: note = Amino acid sequence

SEQ ID NO: 4807 - protein, 219 aa, synthetic construct; identical to SEQ ID NO: 266
  REGION 1..219: note = Amino acid sequence

SEQ ID NO: 4808 - protein, 224 aa, synthetic construct; identical to SEQ ID NO: 267
  REGION 1..224: note = Amino acid sequence

SEQ ID NO: 4809 - protein, 221 aa, synthetic construct; identical to SEQ ID NO: 268
  REGION 1..221: note = Amino acid sequence

SEQ ID NO: 4810 - protein, 222 aa, synthetic construct; identical to SEQ ID NO: 269
  REGION 1..222: note = Amino acid sequence

SEQ ID NO: 4811 - protein, 222 aa, synthetic construct; identical to SEQ ID NO: 270
  REGION 1..222: note = Amino acid sequence

SEQ ID NO: 4812 - protein, 218 aa, synthetic construct; identical to SEQ ID NO: 271
  REGION 1..218: note = Amino acid sequence

SEQ ID NO: 4813 - protein, 214 aa, synthetic construct; identical to SEQ ID NO: 272
  REGION 1..214: note = Amino acid sequence

SEQ ID NO: 4814 - protein, 214 aa, synthetic construct; identical to SEQ ID NO: 273
  REGION 1..214: note = Amino acid sequence

SEQ ID NO: 4815 - protein, 214 aa, synthetic construct; identical to SEQ ID NO: 274
  REGION 1..214: note = Amino acid sequence

SEQ ID NO: 4816 - protein, 110 aa, synthetic construct; identical to SEQ ID NO: 275
  REGION 1..110: note = Amino acid sequence

SEQ ID NO: 4817 - protein, 212 aa, synthetic construct; identical to SEQ ID NO: 276
  REGION 1..212: note = Amino acid sequence

SEQ ID NO: 4818 - protein, 214 aa, synthetic construct; identical to SEQ ID NO: 277
  REGION 1..214: note = Amino acid sequence

SEQ ID NO: 4819 - protein, 106 aa, synthetic construct; identical to SEQ ID NO: 278
  REGION 1..106: note = Amino acid sequence

SEQ ID NO: 4820 - protein, 216 aa, synthetic construct; identical to SEQ ID NO: 279
  REGION 1..216: note = Amino acid sequence

SEQ ID NO: 4821 - protein, 110 aa, synthetic construct; identical to SEQ ID NO: 280
  REGION 1..110: note = Amino acid sequence

SEQ ID NO: 4822 - protein, 215 aa, synthetic construct; identical to SEQ ID NO: 281
  REGION 1..215: note = Amino acid sequence

SEQ ID NO: 4823 - protein, 215 aa, synthetic construct; identical to SEQ ID NO: 282
  REGION 1..215: note = Amino acid sequence

SEQ ID NO: 4824 - protein, 112 aa, synthetic construct; identical to SEQ ID NO: 283
  REGION 1..112: note = Amino acid sequence

SEQ ID NO: 4825 - protein, 216 aa, synthetic construct; identical to SEQ ID NO: 284
  REGION 1..216: note = Amino acid sequence

SEQ ID NO: 4826 - protein, 216 aa, synthetic construct; identical to SEQ ID NO: 285
  REGION 1..216: note = Amino acid sequence

SEQ ID NO: 4827 - protein, 213 aa, synthetic construct; identical to SEQ ID NO: 286
  REGION 1..213: note = Amino acid sequence

SEQ ID NO: 4828 - protein, 215 aa, synthetic construct; identical to SEQ ID NO: 287
  REGION 1..215: note = Amino acid sequence

SEQ ID NO: 4829 - protein, 212 aa, synthetic construct
  REGION 1..212: note = Amino acid sequence
PYELTQPPSVSVSPGQTARITCSGDALPKQYAYWYQQKPGQAPVLVIYKDSERPSGIPERFSGSSSGTTVTLTISGVQAEDEADYYCQSADSSDTYVFGGGTKLTVLGQPKAAPSVTLFPPSSEELQANKATLVCLISDFYPGAVTVAWKADSSPVKAGVETTTPSKQSNNKYAASSYLSLTPEQWKSHRSYSCQVTHEGSTVEKTVAPTEC

SEQ ID NO: 4830 - protein, 214 aa, synthetic construct; identical to SEQ ID NO: 289
  REGION 1..214: note = Amino acid sequence

SEQ ID NO: 4831 - protein, 215 aa, synthetic construct; identical to SEQ ID NO: 290
  REGION 1..215: note = Amino acid sequence

SEQ ID NO: 4832 - protein, 213 aa, synthetic construct; identical to SEQ ID NO: 291
  REGION 1..213: note = Amino acid sequence

SEQ ID NO: 4833 - protein, 220 aa, synthetic construct; identical to SEQ ID NO: 292
  REGION 1..220: note = Amino acid sequence

SEQ ID NO: 4834 - protein, 106 aa, synthetic construct; identical to SEQ ID NO: 293
  REGION 1..106: note = Amino acid sequence

SEQ ID NO: 4835 - protein, 217 aa, synthetic construct; identical to SEQ ID NO: 294
  REGION 1..217: note = Amino acid sequence

SEQ ID NO: 4836 - protein, 216 aa, synthetic construct; identical to SEQ ID NO: 295
  REGION 1..216: note = Amino acid sequence

SEQ ID NO: 4837 - protein, 214 aa, synthetic construct; identical to SEQ ID NO: 296
  REGION 1..214: note = Amino acid sequence

SEQ ID NO: 4838 - protein, 214 aa, synthetic construct; identical to SEQ ID NO: 297
  REGION 1..214: note = Amino acid sequence

SEQ ID NO: 4839 - protein, 217 aa, synthetic construct; identical to SEQ ID NO: 298
  REGION 1..217: note = Amino acid sequence

SEQ ID NO: 4840 - protein, 108 aa, synthetic construct; identical to SEQ ID NO: 299
  REGION 1..108: note = Amino acid sequence

SEQ ID NO: 4841 - protein, 214 aa, synthetic construct; identical to SEQ ID NO: 300
  REGION 1..214: note = Amino acid sequence

SEQ ID NO: 4842 - protein, 213 aa, synthetic construct; identical to SEQ ID NO: 301
  REGION 1..213: note = Amino acid sequence

SEQ ID NO: 4843 - protein, 217 aa, synthetic construct; identical to SEQ ID NO: 302
  REGION 1..217: note = Amino acid sequence

SEQ ID NO: 4844 - protein, 216 aa, synthetic construct; identical to SEQ ID NO: 303
  REGION 1..216: note = Amino acid sequence

SEQ ID NO: 4845 - protein, 219 aa, synthetic construct; identical to SEQ ID NO: 304
  REGION 1..219: note = Amino acid sequence

SEQ ID NO: 4846 - protein, 108 aa, synthetic construct; identical to SEQ ID NO: 305
  REGION 1..108: note = Amino acid sequence

SEQ ID NO: 4847 - protein, 217 aa, synthetic construct; identical to SEQ ID NO: 306
  REGION 1..217: note = Amino acid sequence

SEQ ID NO: 4848 - protein, 214 aa, synthetic construct; identical to SEQ ID NO: 307
  REGION 1..214: note = Amino acid sequence

SEQ ID NO: 4849 - protein, 220 aa, synthetic construct; identical to SEQ ID NO: 308
  REGION 1..220: note = Amino acid sequence

SEQ ID NO: 4850 - protein, 219 aa, synthetic construct; identical to SEQ ID NO: 309
  REGION 1..219: note = Amino acid sequence

SEQ ID NO: 4851 - protein, 216 aa, synthetic construct; identical to SEQ ID NO: 310
  REGION 1..216: note = Amino acid sequence

SEQ ID NO: 4852 - protein, 214 aa, synthetic construct; identical to SEQ ID NO: 311
  REGION 1..214: note = Amino acid sequence

SEQ ID NO: 4853 - protein, 214 aa, synthetic construct; identical to SEQ ID NO: 312
  REGION 1..214: note = Amino acid sequence

SEQ ID NO: 4854 - protein, 216 aa, synthetic construct; identical to SEQ ID NO: 313
  REGION 1..216: note = Amino acid sequence

SEQ ID NO: 4855 - protein, 214 aa, synthetic construct; identical to SEQ ID NO: 314
  REGION 1..214: note = Amino acid sequence

SEQ ID NO: 4856 - protein, 108 aa, synthetic construct; identical to SEQ ID NO: 315
  REGION 1..108: note = Amino acid sequence

SEQ ID NO: 4857 - protein, 109 aa, synthetic construct; identical to SEQ ID NO: 316
  REGION 1..109: note = Amino acid sequence

SEQ ID NO: 4858 - protein, 214 aa, synthetic construct; identical to SEQ ID NO: 317
  REGION 1..214: note = Amino acid sequence

SEQ ID NO: 4859 - protein, 215 aa, synthetic construct; identical to SEQ ID NO: 318
  REGION 1..215: note = Amino acid sequence

SEQ ID NO: 4860 - protein, 216 aa, synthetic construct; identical to SEQ ID NO: 319
  REGION 1..216: note = Amino acid sequence

SEQ ID NO: 4861 - protein, 214 aa, synthetic construct; identical to SEQ ID NO: 320
  REGION 1..214: note = Amino acid sequence

SEQ ID NO: 4862 - protein, 215 aa, synthetic construct; identical to SEQ ID NO: 321
  REGION 1..215: note = Amino acid sequence

SEQ ID NO: 4863 - protein, 214 aa, synthetic construct; identical to SEQ ID NO: 322
  REGION 1..214: note = Amino acid sequence

SEQ ID NO: 4864 - protein, 215 aa, synthetic construct; identical to SEQ ID NO: 323
  REGION 1..215: note = Amino acid sequence

SEQ ID NO: 4865 - protein, 108 aa, synthetic construct; identical to SEQ ID NO: 324
  REGION 1..108: note = Amino acid sequence

SEQ ID NO: 4866 - protein, 219 aa, synthetic construct; identical to SEQ ID NO: 325
  REGION 1..219: note = Amino acid sequence

SEQ ID NO: 4867 - protein, 213 aa, synthetic construct; identical to SEQ ID NO: 326
  REGION 1..213: note = Amino acid sequence

SEQ ID NO: 4868 - protein, 110 aa, synthetic construct; identical to SEQ ID NO: 327
  REGION 1..110: note = Amino acid sequence

SEQ ID NO: 4869 - protein, 216 aa, synthetic construct; identical to SEQ ID NO: 328
  REGION 1..216: note = Amino acid sequence

SEQ ID NO: 4870 - protein, 215 aa, synthetic construct; identical to SEQ ID NO: 329
  REGION 1..215: note = Amino acid sequence

SEQ ID NO: 4871 - protein, 214 aa, synthetic construct; identical to SEQ ID NO: 330
  REGION 1..214: note = Amino acid sequence

SEQ ID NO: 4872 - protein, 214 aa, synthetic construct; identical to SEQ ID NO: 331
  REGION 1..214: note = Amino acid sequence

SEQ ID NO: 4873 - protein, 215 aa, synthetic construct; identical to SEQ ID NO: 332
  REGION 1..215: note = Amino acid sequence

SEQ ID NO: 4874 - protein, 214 aa, synthetic construct; identical to SEQ ID NO: 333
  REGION 1..214: note = Amino acid sequence

SEQ ID NO: 4875 - protein, 219 aa, synthetic construct; identical to SEQ ID NO: 334
  REGION 1..219: note = Amino acid sequence

SEQ ID NO: 4876 - protein, 217 aa, synthetic construct; identical to SEQ ID NO: 335
  REGION 1..217: note = Amino acid sequence

SEQ ID NO: 4877 - protein, 215 aa, synthetic construct; identical to SEQ ID NO: 336
  REGION 1..215: note = Amino acid sequence

SEQ ID NO: 4878 - protein, 216 aa, synthetic construct; identical to SEQ ID NO: 337
  REGION 1..216: note = Amino acid sequence

SEQ ID NO: 4879 - protein, 219 aa, synthetic construct; identical to SEQ ID NO: 338
  REGION 1..219: note = Amino acid sequence

SEQ ID NO: 4880 - protein, 216 aa, synthetic construct; identical to SEQ ID NO: 339
  REGION 1..216: note = Amino acid sequence

SEQ ID NO: 4881 - protein, 215 aa, synthetic construct; identical to SEQ ID NO: 340
  REGION 1..215: note = Amino acid sequence

SEQ ID NO: 4882 - protein, 216 aa, synthetic construct; identical to SEQ ID NO: 341
  REGION 1..216: note = Amino acid sequence

SEQ ID NO: 4883 - protein, 214 aa, synthetic construct; identical to SEQ ID NO: 342
  REGION 1..214: note = Amino acid sequence

SEQ ID NO: 4884 - protein, 216 aa, synthetic construct; identical to SEQ ID NO: 343
  REGION 1..216: note = Amino acid sequence

SEQ ID NO: 4885 - protein, 107 aa, synthetic construct; identical to SEQ ID NO: 344
  REGION 1..107: note = Amino acid sequence

SEQ ID NO: 4886 - protein, 215 aa, synthetic construct; identical to SEQ ID NO: 345
  REGION 1..215: note = Amino acid sequence

SEQ ID NO: 4887 - protein, 214 aa, synthetic construct; identical to SEQ ID NO: 346
  REGION 1..214: note = Amino acid sequence

SEQ ID NO: 4888 - protein, 217 aa, synthetic construct; identical to SEQ ID NO: 347
  REGION 1..217: note = Amino acid sequence

SEQ ID NO: 4889 - protein, 217 aa, synthetic construct; identical to SEQ ID NO: 348
  REGION 1..217: note = Amino acid sequence

SEQ ID NO: 4890 - protein, 213 aa, synthetic construct; identical to SEQ ID NO: 349
  REGION 1..213: note = Amino acid sequence

SEQ ID NO: 4891 - protein, 221 aa, synthetic construct; identical to SEQ ID NO: 350
  REGION 1..221: note = Amino acid sequence

SEQ ID NO: 4892 - protein, 214 aa, synthetic construct; identical to SEQ ID NO: 351
  REGION 1..214: note = Amino acid sequence

SEQ ID NO: 4893 - protein, 214 aa, synthetic construct; identical to SEQ ID NO: 352
  REGION 1..214: note = Amino acid sequence

SEQ ID NO: 4894 - protein, 217 aa, synthetic construct; identical to SEQ ID NO: 353
  REGION 1..217: note = Amino acid sequence

SEQ ID NO: 4895 - protein, 214 aa, synthetic construct; identical to SEQ ID NO: 354
  REGION 1..214: note = Amino acid sequence

SEQ ID NO: 4896 - protein, 214 aa, synthetic construct; identical to SEQ ID NO: 355
  REGION 1..214: note = Amino acid sequence

SEQ ID NO: 4897 - protein, 217 aa, synthetic construct; identical to SEQ ID NO: 356
  REGION 1..217: note = Amino acid sequence

SEQ ID NO: 4898 - protein, 220 aa, synthetic construct; identical to SEQ ID NO: 357
  REGION 1..220: note = Amino acid sequence

SEQ ID NO: 4899 - protein, 106 aa, synthetic construct; identical to SEQ ID NO: 358
  REGION 1..106: note = Amino acid sequence

SEQ ID NO: 4900 - protein, 212 aa, synthetic construct; identical to SEQ ID NO: 359
  REGION 1..212: note = Amino acid sequence

SEQ ID NO: 4901 - protein, 220 aa, synthetic construct; identical to SEQ ID NO: 360
  REGION 1..220: note = Amino acid sequence

SEQ ID NO: 4902 - protein, 216 aa, synthetic construct; identical to SEQ ID NO: 361
  REGION 1..216: note = Amino acid sequence

SEQ ID NO: 4903 - protein, 215 aa, synthetic construct; identical to SEQ ID NO: 362
  REGION 1..215: note = Amino acid sequence

SEQ ID NO: 4904 - protein, 219 aa, synthetic construct; identical to SEQ ID NO: 363
  REGION 1..219: note = Amino acid sequence

SEQ ID NO: 4905 - protein, 214 aa, synthetic construct; identical to SEQ ID NO: 364
  REGION 1..214: note = Amino acid sequence

SEQ ID NO: 4906 - protein, 216 aa, synthetic construct; identical to SEQ ID NO: 365
  REGION 1..216: note = Amino acid sequence

SEQ ID NO: 4907 - protein, 215 aa, synthetic construct; identical to SEQ ID NO: 362
  REGION 1..215: note = Amino acid sequence

SEQ ID NO: 4908 - protein, 112 aa, synthetic construct; identical to SEQ ID NO: 367
  REGION 1..112: note = Amino acid sequence

SEQ ID NO: 4909 - protein, 216 aa, synthetic construct; identical to SEQ ID NO: 368
  REGION 1..216: note = Amino acid sequence

SEQ ID NO: 4910 - protein, 220 aa, synthetic construct; identical to SEQ ID NO: 369
  REGION 1..220: note = Amino acid sequence

SEQ ID NO: 4911 - protein, 214 aa, synthetic construct; identical to SEQ ID NO: 370
  REGION 1..214: note = Amino acid sequence

SEQ ID NO: 4912 - protein, 214 aa, synthetic construct; identical to SEQ ID NO: 371
  REGION 1..214: note = Amino acid sequence

SEQ ID NO: 4913 - protein, 214 aa, synthetic construct; identical to SEQ ID NO: 372
  REGION 1..214: note = Amino acid sequence

SEQ ID NO: 4914 - protein, 215 aa, synthetic construct; identical to SEQ ID NO: 373
  REGION 1..215: note = Amino acid sequence

SEQ ID NO: 4915 - protein, 214 aa, synthetic construct; identical to SEQ ID NO: 374
  REGION 1..214: note = Amino acid sequence

SEQ ID NO: 4916 - protein, 215 aa, synthetic construct; identical to SEQ ID NO: 375
  REGION 1..215: note = Amino acid sequence

SEQ ID NO: 4917 - protein, 112 aa, synthetic construct; identical to SEQ ID NO: 376
  REGION 1..112: note = Amino acid sequence

SEQ ID NO: 4918 - protein, 215 aa, synthetic construct; identical to SEQ ID NO: 377
  REGION 1..215: note = Amino acid sequence

SEQ ID NO: 4919 - protein, 217 aa, synthetic construct; identical to SEQ ID NO: 378
  REGION 1..217: note = Amino acid sequence

SEQ ID NO: 4920 - protein, 216 aa, synthetic construct; identical to SEQ ID NO: 379
  REGION 1..216: note = Amino acid sequence

SEQ ID NO: 4921 - protein, 215 aa, synthetic construct; identical to SEQ ID NO: 380
  REGION 1..215: note = Amino acid sequence

SEQ ID NO: 4922 - protein, 220 aa, synthetic construct; identical to SEQ ID NO: 381
  REGION 1..220: note = Amino acid sequence

SEQ ID NO: 4923 - protein, 108 aa, synthetic construct; identical to SEQ ID NO: 382
  REGION 1..108: note = Amino acid sequence

SEQ ID NO: 4924 - protein, 216 aa, synthetic construct; identical to SEQ ID NO: 383
  REGION 1..216: note = Amino acid sequence

SEQ ID NO: 4925 - protein, 214 aa, synthetic construct; identical to SEQ ID NO: 384
  REGION 1..214: note = Amino acid sequence

SEQ ID NO: 4926 - protein, 215 aa, synthetic construct; identical to SEQ ID NO: 385
  REGION 1..215: note = Amino acid sequence

SEQ ID NO: 4927 - protein, 217 aa, synthetic construct; identical to SEQ ID NO: 386
  REGION 1..217: note = Amino acid sequence

SEQ ID NO: 4928 - protein, 216 aa, synthetic construct; identical to SEQ ID NO: 387
  REGION 1..216: note = Amino acid sequence

SEQ ID NO: 4929 - protein, 218 aa, synthetic construct; identical to SEQ ID NO: 388
  REGION 1..218: note = Amino acid sequence

SEQ ID NO: 4930 - protein, 215 aa, synthetic construct; identical to SEQ ID NO: 389
  REGION 1..215: note = Amino acid sequence

SEQ ID NO: 4931 - protein, 110 aa, synthetic construct; identical to SEQ ID NO: 390
  REGION 1..110: note = Amino acid sequence

SEQ ID NO: 4932 - protein, 107 aa, synthetic construct; identical to SEQ ID NO: 391
  REGION 1..107: note = Amino acid sequence

SEQ ID NO: 4933 - protein, 214 aa, synthetic construct; identical to SEQ ID NO: 392
  REGION 1..214: note = Amino acid sequence

SEQ ID NO: 4934 - protein, 214 aa, synthetic construct; identical to SEQ ID NO: 393
  REGION 1..214: note = Amino acid sequence

SEQ ID NO: 4935 - protein, 215 aa, synthetic construct; identical to SEQ ID NO: 394
  REGION 1..215: note = Amino acid sequence

SEQ ID NO: 4936 - protein, 214 aa, synthetic construct; identical to SEQ ID NO: 395
  REGION 1..214: note = Amino acid sequence

SEQ ID NO: 4937 - protein, 215 aa, synthetic construct; identical to SEQ ID NO: 396
  REGION 1..215: note = Amino acid sequence

SEQ ID NO: 4938 - protein, 216 aa, synthetic construct; identical to SEQ ID NO: 397
  REGION 1..216: note = Amino acid sequence

SEQ ID NO: 4939 - protein, 214 aa, synthetic construct; identical to SEQ ID NO: 398
  REGION 1..214: note = Amino acid sequence

SEQ ID NO: 4940 - protein, 216 aa, synthetic construct; identical to SEQ ID NO: 399
  REGION 1..216: note = Amino acid sequence

SEQ ID NO: 4941 - protein, 216 aa, synthetic construct; identical to SEQ ID NO: 400
  REGION 1..216: note = Amino acid sequence

SEQ ID NO: 4942 - protein, 212 aa, synthetic construct; identical to SEQ ID NO: 401
  REGION 1..212: note = Amino acid sequence

SEQ ID NO: 4943 - protein, 108 aa, synthetic construct; identical to SEQ ID NO: 402
  REGION 1..108: note = Amino acid sequence

SEQ ID NO: 4944 - protein, 214 aa, synthetic construct; identical to SEQ ID NO: 403
  REGION 1..214: note = Amino acid sequence

SEQ ID NO: 4945 - protein, 212 aa, synthetic construct; identical to SEQ ID NO: 404
  REGION 1..212: note = Amino acid sequence

SEQ ID NO: 4946 - protein, 213 aa, synthetic construct; identical to SEQ ID NO: 405
  REGION 1..213: note = Amino acid sequence

SEQ ID NO: 4947 - protein, 214 aa, synthetic construct; identical to SEQ ID NO: 406
  REGION 1..214: note = Amino acid sequence

SEQ ID NO: 4948 - protein, 107 aa, synthetic construct; identical to SEQ ID NO: 407
  REGION 1..107: note = Amino acid sequence

SEQ ID NO: 4949 - protein, 214 aa, synthetic construct; identical to SEQ ID NO: 408
  REGION 1..214: note = Amino acid sequence

SEQ ID NO: 4950 - protein, 110 aa, synthetic construct; identical to SEQ ID NO: 409
  REGION 1..110: note = Amino acid sequence

SEQ ID NO: 4951 - protein, 105 aa, synthetic construct; identical to SEQ ID NO: 410
  REGION 1..105: note = Amino acid sequence

SEQ ID NO: 4952 - protein, 110 aa, synthetic construct; identical to SEQ ID NO: 411
  REGION 1..110: note = Amino acid sequence

SEQ ID NO: 4953 - protein, 214 aa, synthetic construct; identical to SEQ ID NO: 412
  REGION 1..214: note = Amino acid sequence

SEQ ID NO: 4954 - protein, 215 aa, synthetic construct; identical to SEQ ID NO: 413
  REGION 1..215: note = Amino acid sequence

SEQ ID NO: 4955 - protein, 216 aa, synthetic construct; identical to SEQ ID NO: 414
  REGION 1..216: note = Amino acid sequence

SEQ ID NO: 4956 - protein, 214 aa, synthetic construct; identical to SEQ ID NO: 415
  REGION 1..214: note = Amino acid sequence

SEQ ID NO: 4957 - protein, 214 aa, synthetic construct; identical to SEQ ID NO: 416
  REGION 1..214: note = Amino acid sequence

SEQ ID NO: 4958 - protein, 106 aa, synthetic construct; identical to SEQ ID NO: 417
  REGION 1..106: note = Amino acid sequence

SEQ ID NO: 4959 - protein, 216 aa, synthetic construct; identical to SEQ ID NO: 418
  REGION 1..216: note = Amino acid sequence

SEQ ID NO: 4960 - protein, 215 aa, synthetic construct; identical to SEQ ID NO: 419
  REGION 1..215: note = Amino acid sequence

SEQ ID NO: 4961 - protein, 113 aa, synthetic construct; identical to SEQ ID NO: 420
  REGION 1..113: note = Amino acid sequence

SEQ ID NO: 4962 - protein, 216 aa, synthetic construct; identical to SEQ ID NO: 421
  REGION 1..216: note = Amino acid sequence

SEQ ID NO: 4963 - protein, 216 aa, synthetic construct; identical to SEQ ID NO: 422
  REGION 1..216: note = Amino acid sequence

SEQ ID NO: 4964 - protein, 214 aa, synthetic construct; identical to SEQ ID NO: 423
  REGION 1..214: note = Amino acid sequence

SEQ ID NO: 4965 - protein, 214 aa, synthetic construct; identical to SEQ ID NO: 424
  REGION 1..214: note = Amino acid sequence

SEQ ID NO: 4966 - protein, 216 aa, synthetic construct; identical to SEQ ID NO: 425
  REGION 1..216: note = Amino acid sequence

SEQ ID NO: 4967 - protein, 215 aa, synthetic construct; identical to SEQ ID NO: 426
  REGION 1..215: note = Amino acid sequence

SEQ ID NO: 4968 - protein, 217 aa, synthetic construct; identical to SEQ ID NO: 427
  REGION 1..217: note = Amino acid sequence

SEQ ID NO: 4969 - protein, 217 aa, synthetic construct; identical to SEQ ID NO: 428
  REGION 1..217: note = Amino acid sequence

SEQ ID NO: 4970 - protein, 112 aa, synthetic construct; identical to SEQ ID NO: 429
  REGION 1..112: note = Amino acid sequence

SEQ ID NO: 4971 - protein, 214 aa, synthetic construct; identical to SEQ ID NO: 430
  REGION 1..214: note = Amino acid sequence

SEQ ID NO: 4972 - protein, 216 aa, synthetic construct; identical to SEQ ID NO: 431
  REGION 1..216: note = Amino acid sequence

SEQ ID NO: 4973 - protein, 219 aa, synthetic construct; identical to SEQ ID NO: 432
  REGION 1..219: note = Amino acid sequence

SEQ ID NO: 4974 - protein, 216 aa, synthetic construct; identical to SEQ ID NO: 433
  REGION 1..216: note = Amino acid sequence

SEQ ID NO: 4975 - protein, 214 aa, synthetic construct; identical to SEQ ID NO: 434
  REGION 1..214: note = Amino acid sequence

SEQ ID NO: 4976 - protein, 220 aa, synthetic construct; identical to SEQ ID NO: 435
  REGION 1..220: note = Amino acid sequence

SEQ ID NO: 4977 - protein, 217 aa, synthetic construct; identical to SEQ ID NO: 436
  REGION 1..217: note = Amino acid sequence

SEQ ID NO: 4978 - protein, 213 aa, synthetic construct; identical to SEQ ID NO: 437
  REGION 1..213: note = Amino acid sequence

SEQ ID NO: 4979 - protein, 214 aa, synthetic construct; identical to SEQ ID NO: 438
  REGION 1..214: note = Amino acid sequence

SEQ ID NO: 4980 - protein, 217 aa, synthetic construct; identical to SEQ ID NO: 439
  REGION 1..217: note = Amino acid sequence

SEQ ID NO: 4981 - protein, 214 aa, synthetic construct; identical to SEQ ID NO: 440
  REGION 1..214: note = Amino acid sequence

SEQ ID NO: 4982 - protein, 217 aa, synthetic construct; identical to SEQ ID NO: 441
  REGION 1..217: note = Amino acid sequence

SEQ ID NO: 4983 - protein, 220 aa, synthetic construct; identical to SEQ ID NO: 442
  REGION 1..220: note = Amino acid sequence

SEQ ID NO: 4984 - protein, 216 aa, synthetic construct; identical to SEQ ID NO: 443
  REGION 1..216: note = Amino acid sequence

SEQ ID NO: 4985 - protein, 213 aa, synthetic construct; identical to SEQ ID NO: 444
  REGION 1..213: note = Amino acid sequence

SEQ ID NO: 4986 - protein, 215 aa, synthetic construct; identical to SEQ ID NO: 445
  REGION 1..215: note = Amino acid sequence

SEQ ID NO: 4987 - protein, 215 aa, synthetic construct; identical to SEQ ID NO: 446
  REGION 1..215: note = Amino acid sequence

SEQ ID NO: 4988 - protein, 217 aa, synthetic construct; identical to SEQ ID NO: 447
  REGION 1..217: note = Amino acid sequence

SEQ ID NO: 4989 - protein, 214 aa, synthetic construct; identical to SEQ ID NO: 448
  REGION 1..214: note = Amino acid sequence

SEQ ID NO: 4990 - protein, 215 aa, synthetic construct; identical to SEQ ID NO: 449
  REGION 1..215: note = Amino acid sequence

SEQ ID NO: 4991 - protein, 216 aa, synthetic construct; identical to SEQ ID NO: 450
  REGION 1..216: note = Amino acid sequence

SEQ ID NO: 4992 - protein, 218 aa, synthetic construct; identical to SEQ ID NO: 451
  REGION 1..218: note = Amino acid sequence

SEQ ID NO: 4993 - protein, 216 aa, synthetic construct; identical to SEQ ID NO: 452
  REGION 1..216: note = Amino acid sequence

SEQ ID NO: 4994 - protein, 214 aa, synthetic construct; identical to SEQ ID NO: 453
  REGION 1..214: note = Amino acid sequence

SEQ ID NO: 4995 - protein, 213 aa, synthetic construct; identical to SEQ ID NO: 454
  REGION 1..213: note = Amino acid sequence

SEQ ID NO: 4996 - protein, 213 aa, synthetic construct; identical to SEQ ID NO: 455
  REGION 1..213: note = Amino acid sequence

SEQ ID NO: 4997 - protein, 214 aa, synthetic construct; identical to SEQ ID NO: 456
  REGION 1..214: note = Amino acid sequence

SEQ ID NO: 4998 - protein, 214 aa, synthetic construct; identical to SEQ ID NO: 457
  REGION 1..214: note = Amino acid sequence

SEQ ID NO: 4999 - protein, 219 aa, synthetic construct; identical to SEQ ID NO: 458
  REGION 1..219: note = Amino acid sequence

SEQ ID NO: 5000 - protein, 212 aa, synthetic construct; identical to SEQ ID NO: 459
  REGION 1..212: note = Amino acid sequence

SEQ ID NO: 5001 - protein, 214 aa, synthetic construct; identical to SEQ ID NO: 460
  REGION 1..214: note = Amino acid sequence

SEQ ID NO: 5002 - protein, 215 aa, synthetic construct; identical to SEQ ID NO: 461
  REGION 1..215: note = Amino acid sequence

SEQ ID NO: 5003 - protein, 220 aa, synthetic construct; identical to SEQ ID NO: 462
  REGION 1..220: note = Amino acid sequence

SEQ ID NO: 5004 - protein, 220 aa, synthetic construct; identical to SEQ ID NO: 463
  REGION 1..220: note = Amino acid sequence

SEQ ID NO: 5005 - protein, 216 aa, synthetic construct; identical to SEQ ID NO: 464
  REGION 1..216: note = Amino acid sequence

SEQ ID NO: 5006 - protein, 220 aa, synthetic construct; identical to SEQ ID NO: 465
  REGION 1..220: note = Amino acid sequence

SEQ ID NO: 5007 - protein, 111 aa, synthetic construct; identical to SEQ ID NO: 466
  REGION 1..111: note = Amino acid sequence

SEQ ID NO: 5008 - protein, 214 aa, synthetic construct; identical to SEQ ID NO: 467
  REGION 1..214: note = Amino acid sequence

SEQ ID NO: 5009 - protein, 103 aa, synthetic construct; identical to SEQ ID NO: 468
  REGION 1..103: note = Amino acid sequence

SEQ ID NO: 5010 - protein, 109 aa, synthetic construct; identical to SEQ ID NO: 469
  REGION 1..109: note = Amino acid sequence

SEQ ID NO: 5011 - protein, 215 aa, synthetic construct; identical to SEQ ID NO: 470
  REGION 1..215: note = Amino acid sequence

SEQ ID NO: 5012 - protein, 111 aa, synthetic construct; identical to SEQ ID NO: 471
  REGION 1..111: note = Amino acid sequence

SEQ ID NO: 5013 - protein, 113 aa, synthetic construct; identical to SEQ ID NO: 472
  REGION 1..113: note = Amino acid sequence

SEQ ID NO: 5014 - protein, 214 aa, synthetic construct; identical to SEQ ID NO: 473
  REGION 1..214: note = Amino acid sequence

SEQ ID NO: 5015 - protein, 214 aa, synthetic construct; identical to SEQ ID NO: 474
  REGION 1..214: note = Amino acid sequence

SEQ ID NO: 5016 - protein, 217 aa, synthetic construct; identical to SEQ ID NO: 475
  REGION 1..217: note = Amino acid sequence

SEQ ID NO: 5017 - protein, 217 aa, synthetic construct; identical to SEQ ID NO: 476
  REGION 1..217: note = Amino acid sequence

SEQ ID NO: 5018 - protein, 217 aa, synthetic construct; identical to SEQ ID NO: 477
  REGION 1..217: note = Amino acid sequence

SEQ ID NO: 5019 - protein, 214 aa, synthetic construct; identical to SEQ ID NO: 478
  REGION 1..214: note = Amino acid sequence

SEQ ID NO: 5020 - protein, 214 aa, synthetic construct; identical to SEQ ID NO: 479
  REGION 1..214: note = Amino acid sequence

SEQ ID NO: 5021 - protein, 216 aa, synthetic construct; identical to SEQ ID NO: 480
  REGION 1..216: note = Amino acid sequence

SEQ ID NO: 5022 - protein, 216 aa, synthetic construct; identical to SEQ ID NO: 481
  REGION 1..216: note = Amino acid sequence

SEQ ID NO: 5023 - protein, 216 aa, synthetic construct; identical to SEQ ID NO: 482
  REGION 1..216: note = Amino acid sequence

SEQ ID NO: 5024 - protein, 215 aa, synthetic construct; identical to SEQ ID NO: 483
  REGION 1..215: note = Amino acid sequence

SEQ ID NO: 5025 - protein, 216 aa, synthetic construct; identical to SEQ ID NO: 484
  REGION 1..216: note = Amino acid sequence

SEQ ID NO: 5026 - protein, 218 aa, synthetic construct; identical to SEQ ID NO: 485
  REGION 1..218: note = Amino acid sequence

SEQ ID NO: 5027 - protein, 217 aa, synthetic construct; identical to SEQ ID NO: 486
  REGION 1..217: note = Amino acid sequence

SEQ ID NO: 5028 - protein, 215 aa, synthetic construct; identical to SEQ ID NO: 487
  REGION 1..215: note = Amino acid sequence

SEQ ID NO: 5029 - protein, 216 aa, synthetic construct; identical to SEQ ID NO: 488
  REGION 1..216: note = Amino acid sequence

SEQ ID NO: 5030 - protein, 110 aa, synthetic construct; identical to SEQ ID NO: 489
  REGION 1..110: note = Amino acid sequence

SEQ ID NO: 5031 - protein, 113 aa, synthetic construct; identical to SEQ ID NO: 490
  REGION 1..113: note = Amino acid sequence

SEQ ID NO: 5032 - protein, 216 aa, synthetic construct; identical to SEQ ID NO: 491
  REGION 1..216: note = Amino acid sequence

SEQ ID NO: 5033 - protein, 215 aa, synthetic construct; identical to SEQ ID NO: 492
  REGION 1..215: note = Amino acid sequence

SEQ ID NO: 5034 - protein, 111 aa, synthetic construct; identical to SEQ ID NO: 493
  REGION 1..111: note = Amino acid sequence

SEQ ID NO: 5035 - protein, 107 aa, synthetic construct; identical to SEQ ID NO: 494
  REGION 1..107: note = Amino acid sequence

SEQ ID NO: 5036 - protein, 214 aa, synthetic construct; identical to SEQ ID NO: 495
  REGION 1..214: note = Amino acid sequence

SEQ ID NO: 5037 - protein, 108 aa, synthetic construct; identical to SEQ ID NO: 496
  REGION 1..108: note = Amino acid sequence

SEQ ID NO: 5038 - protein, 113 aa, synthetic construct; identical to SEQ ID NO: 497
  REGION 1..113: note = Amino acid sequence

SEQ ID NO: 5039 - protein, 220 aa, synthetic construct; identical to SEQ ID NO: 498
  REGION 1..220: note = Amino acid sequence

SEQ ID NO: 5040 - protein, 107 aa, synthetic construct; identical to SEQ ID NO: 499
  REGION 1..107: note = Amino acid sequence

SEQ ID NO: 5041 - protein, 214 aa, synthetic construct; identical to SEQ ID NO: 500
  REGION 1..214: note = Amino acid sequence

SEQ ID NO: 5042 - protein, 214 aa, synthetic construct; identical to SEQ ID NO: 501
  REGION 1..214: note = Amino acid sequence

SEQ ID NO: 5043 - protein, 215 aa, synthetic construct; identical to SEQ ID NO: 502
  REGION 1..215: note = Amino acid sequence

SEQ ID NO: 5044 - protein, 220 aa, synthetic construct; identical to SEQ ID NO: 503
  REGION 1..220: note = Amino acid sequence

SEQ ID NO: 5045 - protein, 214 aa, synthetic construct; identical to SEQ ID NO: 504
  REGION 1..214: note = Amino acid sequence

SEQ ID NO: 5046 - protein, 106 aa, synthetic construct; identical to SEQ ID NO: 505
  REGION 1..106: note = Amino acid sequence

SEQ ID NO: 5047 - protein, 220 aa, synthetic construct; identical to SEQ ID NO: 506
  REGION 1..220: note = Amino acid sequence

SEQ ID NO: 5048 - protein, 212 aa, synthetic construct; identical to SEQ ID NO: 507
  REGION 1..212: note = Amino acid sequence

SEQ ID NO: 5049 - protein, 216 aa, synthetic construct; identical to SEQ ID NO: 508
  REGION 1..216: note = Amino acid sequence

SEQ ID NO: 5050 - protein, 218 aa, synthetic construct; identical to SEQ ID NO: 509
  REGION 1..218: note = Amino acid sequence

SEQ ID NO: 5051 - protein, 214 aa, synthetic construct; identical to SEQ ID NO: 510
  REGION 1..214: note = Amino acid sequence

SEQ ID NO: 5052 - protein, 220 aa, synthetic construct; identical to SEQ ID NO: 511
  REGION 1..220: note = Amino acid sequence

SEQ ID NO: 5053 - protein, 220 aa, synthetic construct; identical to SEQ ID NO: 512
  REGION 1..220: note = Amino acid sequence

SEQ ID NO: 5054 - protein, 110 aa, synthetic construct; identical to SEQ ID NO: 513
  REGION 1..110: note = Amino acid sequence

SEQ ID NO: 5055 - protein, 219 aa, synthetic construct; identical to SEQ ID NO: 514
  REGION 1..219: note = Amino acid sequence

SEQ ID NO: 5056 - protein, 212 aa, synthetic construct; identical to SEQ ID NO: 515
  REGION 1..212: note = Amino acid sequence

SEQ ID NO: 5057 - protein, 216 aa, synthetic construct; identical to SEQ ID NO: 516
  REGION 1..216: note = Amino acid sequence

SEQ ID NO: 5058 - protein, 106 aa, synthetic construct; identical to SEQ ID NO: 517
  REGION 1..106: note = Amino acid sequence

SEQ ID NO: 5059 - protein, 219 aa, synthetic construct; identical to SEQ ID NO: 518
  REGION 1..219: note = Amino acid sequence

SEQ ID NO: 5060 - protein, 216 aa, synthetic construct; identical to SEQ ID NO: 519
  REGION 1..216: note = Amino acid sequence

SEQ ID NO: 5061 - protein, 213 aa, synthetic construct; identical to SEQ ID NO: 520
  REGION 1..213: note = Amino acid sequence

SEQ ID NO: 5062 - protein, 214 aa, synthetic construct; identical to SEQ ID NO: 521
  REGION 1..214: note = Amino acid sequence

SEQ ID NO: 5063 - protein, 218 aa, synthetic construct; identical to SEQ ID NO: 522
  REGION 1..218: note = Amino acid sequence

SEQ ID NO: 5064 - protein, 213 aa, synthetic construct; identical to SEQ ID NO: 523
  REGION 1..213: note = Amino acid sequence

SEQ ID NO: 5065 - protein, 102 aa, synthetic construct; identical to SEQ ID NO: 524
  REGION 1..102: note = Amino acid sequence

SEQ ID NO: 5066 - protein, 106 aa, synthetic construct; identical to SEQ ID NO: 525
  REGION 1..106: note = Amino acid sequence

SEQ ID NO: 5067 - protein, 214 aa, synthetic construct; identical to SEQ ID NO: 526
  REGION 1..214: note = Amino acid sequence

SEQ ID NO: 5068 - protein, 214 aa, synthetic construct; identical to SEQ ID NO: 527
  REGION 1..214: note = Amino acid sequence

SEQ ID NO: 5069 - protein, 216 aa, synthetic construct; identical to SEQ ID NO: 528
  REGION 1..216: note = Amino acid sequence

SEQ ID NO: 5070 - protein, 108 aa, synthetic construct; identical to SEQ ID NO: 529
  REGION 1..108: note = Amino acid sequence

SEQ ID NO: 5071 - protein, 217 aa, synthetic construct; identical to SEQ ID NO: 530
  REGION 1..217: note = Amino acid sequence

SEQ ID NO: 5072 - protein, 219 aa, synthetic construct; identical to SEQ ID NO: 531
  REGION 1..219: note = Amino acid sequence

SEQ ID NO: 5073 - protein, 213 aa, synthetic construct; identical to SEQ ID NO: 532
  REGION 1..213: note = Amino acid sequence

SEQ ID NO: 5074 - protein, 219 aa, synthetic construct; identical to SEQ ID NO: 533
  REGION 1..219: note = Amino acid sequence

SEQ ID NO: 5075 - protein, 215 aa, synthetic construct; identical to SEQ ID NO: 534
  REGION 1..215: note = Amino acid sequence

SEQ ID NO: 5076 - protein, 220 aa, synthetic construct; identical to SEQ ID NO: 535
  REGION 1..220: note = Amino acid sequence

SEQ ID NO: 5077 - protein, 217 aa, synthetic construct; identical to SEQ ID NO: 536
  REGION 1..217: note = Amino acid sequence

SEQ ID NO: 5078 - protein, 217 aa, synthetic construct; identical to SEQ ID NO: 537
  REGION 1..217: note = Amino acid sequence

SEQ ID NO: 5079 - protein, 218 aa, synthetic construct; identical to SEQ ID NO: 538
  REGION 1..218: note = Amino acid sequence

SEQ ID NO: 5080 - protein, 220 aa, synthetic construct; identical to SEQ ID NO: 539
  REGION 1..220: note = Amino acid sequence

SEQ ID NO: 5081 - protein, 219 aa, synthetic construct; identical to SEQ ID NO: 540
  REGION 1..219: note = Amino acid sequence

SEQ ID NO: 5082 - protein, 214 aa, synthetic construct; identical to SEQ ID NO: 541
  REGION 1..214: note = Amino acid sequence

SEQ ID NO: 5083 - protein, 219 aa, synthetic construct; identical to SEQ ID NO: 542
  REGION 1..219: note = Amino acid sequence

SEQ ID NO: 5084 - protein, 8 aa, synthetic construct
  REGION 1..8: note = Amino acid sequence
EVTFNTYG

SEQ ID NO: 5085 - protein, 8 aa, synthetic construct
  REGION 1..8: note = Amino acid sequence
GFTFSSYW

SEQ ID NO: 5086 - protein, 8 aa, synthetic construct
  REGION 1..8: note = Amino acid sequence
GFTFEDYA

SEQ ID NO: 5087 - protein, 10 aa, synthetic construct
  REGION 1..10: note = Amino acid sequence
GFSLSTSGVG

SEQ ID NO: 5088 - protein, 8 aa, synthetic construct
  REGION 1..8: note = Amino acid sequence
GYTFTTYY

SEQ ID NO: 5089 - protein, 8 aa, synthetic construct
  REGION 1..8: note = Amino acid sequence
GFVFDDYA

SEQ ID NO: 5090 - protein, 8 aa, synthetic construct
  REGION 1..8: note = Amino acid sequence
GYTFTNYG

SEQ ID NO: 5091 - protein, 8 aa, synthetic construct
  REGION 1..8: note = Amino acid sequence
GFTFDDYA

SEQ ID NO: 5092 - protein, 8 aa, synthetic construct
  REGION 1..8: note = Amino acid sequence
GFTFSYYG

SEQ ID NO: 5093 - protein, 8 aa, synthetic construct
  REGION 1..8: note = Amino acid sequence
GFPFGDYA

SEQ ID NO: 5094 - protein, 8 aa, synthetic construct
  REGION 1..8: note = Amino acid sequence
GYIDINNG

SEQ ID NO: 5095 - protein, 8 aa, synthetic construct
  REGION 1..8: note = Amino acid sequence
GFTFTRHG

SEQ ID NO: 5096 - protein, 8 aa, synthetic construct
  REGION 1..8: note = Amino acid sequence
RFTFSSYA

SEQ ID NO: 5097 - protein, 10 aa, synthetic construct
  REGION 1..10: note = Amino acid sequence
GDGVSSNSAS

SEQ ID NO: 5098 - protein, 8 aa, synthetic construct
  REGION 1..8: note = Amino acid sequence
GFAFSSNG

SEQ ID NO: 5099 - protein, 8 aa, synthetic construct
  REGION 1..8: note = Amino acid sequence
GITFSSYD

SEQ ID NO: 5100 - protein, 8 aa, synthetic construct
  REGION 1..8: note = Amino acid sequence
GYNFTNYG

SEQ ID NO: 5101 - protein, 8 aa, synthetic construct
  REGION 1..8: note = Amino acid sequence
GFSFRSYE

SEQ ID NO: 5102 - protein, 8 aa, synthetic construct
  REGION 1..8: note = Amino acid sequence
GYIFTSYA

SEQ ID NO: 5103 - protein, 9 aa, synthetic construct
  REGION 1..9: note = Amino acid sequence
GYLISSGYY

SEQ ID NO: 5104 - protein, 10 aa, synthetic construct
  REGION 1..10: note = Amino acid sequence
GFSLNTSGVG

SEQ ID NO: 5105 - protein, 8 aa, synthetic construct
  REGION 1..8: note = Amino acid sequence
GFTFSNYS

SEQ ID NO: 5106 - protein, 8 aa, synthetic construct
  REGION 1..8: note = Amino acid sequence
GFTFSSYS

SEQ ID NO: 5107 - protein, 8 aa, synthetic construct
  REGION 1..8: note = Amino acid sequence
GDSMSFYY

SEQ ID NO: 5108 - protein, 10 aa, synthetic construct
  REGION 1..10: note = Amino acid sequence
GGSISSGSYY

SEQ ID NO: 5109 - protein, 8 aa, synthetic construct
  REGION 1..8: note = Amino acid sequence
GFSFSSYS

SEQ ID NO: 5110 - protein, 10 aa, synthetic construct
  REGION 1..10: note = Amino acid sequence
GGSISRSPYF

SEQ ID NO: 5111 - protein, 8 aa, synthetic construct
  REGION 1..8: note = Amino acid sequence
GFTFTSYG

SEQ ID NO: 5112 - protein, 8 aa, synthetic construct
  REGION 1..8: note = Amino acid sequence
SGSSGSYY

SEQ ID NO: 5113 - protein, 8 aa, synthetic construct
  REGION 1..8: note = Amino acid sequence
GYNFRDYY

SEQ ID NO: 5114 - protein, 10 aa, synthetic construct
  REGION 1..10: note = Amino acid sequence
GGSINSGDYH

SEQ ID NO: 5115 - protein, 10 aa, synthetic construct
  REGION 1..10: note = Amino acid sequence
GGSISSSGYY

SEQ ID NO: 5116 - protein, 8 aa, synthetic construct
  REGION 1..8: note = Amino acid sequence
GFTFSSYG

SEQ ID NO: 5117 - protein, 10 aa, synthetic construct
  REGION 1..10: note = Amino acid sequence
GFSLTTSGVG

SEQ ID NO: 5118 - protein, 8 aa, synthetic construct
  REGION 1..8: note = Amino acid sequence
GFTFSTYE

SEQ ID NO: 5119 - protein, 8 aa, synthetic construct
  REGION 1..8: note = Amino acid sequence
GGTFSSYA

SEQ ID NO: 5120 - protein, 10 aa, synthetic construct
  REGION 1..10: note = Amino acid sequence
GGSISSDNYY

SEQ ID NO: 5121 - protein, 8 aa, synthetic construct
  REGION 1..8: note = Amino acid sequence
GASISSYY

SEQ ID NO: 5122 - protein, 8 aa, synthetic construct
  REGION 1..8: note = Amino acid sequence
GNTFTTYT

SEQ ID NO: 5123 - protein, 8 aa, synthetic construct
  REGION 1..8: note = Amino acid sequence
GFTFSSYA

SEQ ID NO: 5124 - protein, 8 aa, synthetic construct
  REGION 1..8: note = Amino acid sequence
GFTFDDYG

SEQ ID NO: 5125 - protein, 8 aa, synthetic construct
  REGION 1..8: note = Amino acid sequence
GFTFSSYG

SEQ ID NO: 5126 - protein, 10 aa, synthetic construct
  REGION 1..10: note = Amino acid sequence
GGSISSGGYY

SEQ ID NO: 5127 - protein, 8 aa, synthetic construct
  REGION 1..8: note = Amino acid sequence
GYTFTGYY

SEQ ID NO: 5128 - protein, 8 aa, synthetic construct
  REGION 1..8: note = Amino acid sequence
GFTFSSYD

SEQ ID NO: 5129 - protein, 8 aa, synthetic construct
  REGION 1..8: note = Amino acid sequence
GFTFRSYG

SEQ ID NO: 5130 - protein, 8 aa, synthetic construct
  REGION 1..8: note = Amino acid sequence
GFTFSDYY

SEQ ID NO: 5131 - protein, 8 aa, synthetic construct
  REGION 1..8: note = Amino acid sequence
GFTFSSYH

SEQ ID NO: 5132 - protein, 8 aa, synthetic construct
  REGION 1..8: note = Amino acid sequence
GFTFSSYA

SEQ ID NO: 5133 - protein, 8 aa, synthetic construct
  REGION 1..8: note = Amino acid sequence
GFTLEEFA

SEQ ID NO: 5134 - protein, 8 aa, synthetic construct
  REGION 1..8: note = Amino acid sequence
GGSISDYY

SEQ ID NO: 5135 - protein, 8 aa, synthetic construct
  REGION 1..8: note = Amino acid sequence
GGTFSSYA

SEQ ID NO: 5136 - protein, 8 aa, synthetic construct
  REGION 1..8: note = Amino acid sequence
GYTFSSYG

SEQ ID NO: 5137 - protein, 8 aa, synthetic construct
  REGION 1..8: note = Amino acid sequence
GFTFRSYE

SEQ ID NO: 5138 - protein, 8 aa, synthetic construct
  REGION 1..8: note = Amino acid sequence
GGTFSSYA

SEQ ID NO: 5139 - protein, 8 aa, synthetic construct
  REGION 1..8: note = Amino acid sequence
GDSFNKYF

SEQ ID NO: 5140 - protein, 8 aa, synthetic construct
  REGION 1..8: note = Amino acid sequence
GFTFSTYG

SEQ ID NO: 5141 - protein, 8 aa, synthetic construct
  REGION 1..8: note = Amino acid sequence
GFAFSSYA

SEQ ID NO: 5142 - protein, 8 aa, synthetic construct
  REGION 1..8: note = Amino acid sequence
GFTFSNHA

SEQ ID NO: 5143 - protein, 8 aa, synthetic construct
  REGION 1..8: note = Amino acid sequence
GFTFSSHG

SEQ ID NO: 5144 - protein, 10 aa, synthetic construct
  REGION 1..10: note = Amino acid sequence
GGSVDNVDSY

SEQ ID NO: 5145 - protein, 8 aa, synthetic construct
  REGION 1..8: note = Amino acid sequence
GYSFTTYW

SEQ ID NO: 5146 - protein, 10 aa, synthetic construct
  REGION 1..10: note = Amino acid sequence
GDSISSGSYY

SEQ ID NO: 5147 - protein, 10 aa, synthetic construct
  REGION 1..10: note = Amino acid sequence
GDSVSSNSAA

SEQ ID NO: 5148 - protein, 8 aa, synthetic construct
  REGION 1..8: note = Amino acid sequence
GYTLSELS

SEQ ID NO: 5149 - protein, 8 aa, synthetic construct
  REGION 1..8: note = Amino acid sequence
GFTFSSYS

SEQ ID NO: 5150 - protein, 8 aa, synthetic construct
  REGION 1..8: note = Amino acid sequence
GFTFSNYA

SEQ ID NO: 5151 - protein, 8 aa, synthetic construct
  REGION 1..8: note = Amino acid sequence
GGPFSSYT

SEQ ID NO: 5152 - protein, 10 aa, synthetic construct
  REGION 1..10: note = Amino acid sequence
GGSVNTGTSY

SEQ ID NO: 5153 - protein, 8 aa, synthetic construct
  REGION 1..8: note = Amino acid sequence
GFHFGSHG

SEQ ID NO: 5154 - protein, 10 aa, synthetic construct
  REGION 1..10: note = Amino acid sequence
GGSITTGSYY

SEQ ID NO: 5155 - protein, 8 aa, synthetic construct
  REGION 1..8: note = Amino acid sequence
GFTFDDYA

SEQ ID NO: 5156 - protein, 8 aa, synthetic construct
  REGION 1..8: note = Amino acid sequence
GASMNNYY

SEQ ID NO: 5157 - protein, 10 aa, synthetic construct
  REGION 1..10: note = Amino acid sequence
GFSLTTTDVG

SEQ ID NO: 5158 - protein, 8 aa, synthetic construct
  REGION 1..8: note = Amino acid sequence
GFTFSSYS

SEQ ID NO: 5159 - protein, 8 aa, synthetic construct
  REGION 1..8: note = Amino acid sequence
GYNFISHW

SEQ ID NO: 5160 - protein, 8 aa, synthetic construct
  REGION 1..8: note = Amino acid sequence
GYSFTSFW

SEQ ID NO: 5161 - protein, 8 aa, synthetic construct
  REGION 1..8: note = Amino acid sequence
GGSIDSYY

SEQ ID NO: 5162 - protein, 8 aa, synthetic construct
  REGION 1..8: note = Amino acid sequence
GGIFSYFA

SEQ ID NO: 5163 - protein, 8 aa, synthetic construct
  REGION 1..8: note = Amino acid sequence
EFSFQYFS

SEQ ID NO: 5164 - protein, 9 aa, synthetic construct
  REGION 1..9: note = Amino acid sequence
GYTLNNDVA

SEQ ID NO: 5165 - protein, 8 aa, synthetic construct
  REGION 1..8: note = Amino acid sequence
GFRFNYYW

SEQ ID NO: 5166 - protein, 10 aa, synthetic construct
  REGION 1..10: note = Amino acid sequence
GGSISGDKNF

SEQ ID NO: 5167 - protein, 8 aa, synthetic construct
  REGION 1..8: note = Amino acid sequence
GFTFSDYE

SEQ ID NO: 5168 - protein, 8 aa, synthetic construct
  REGION 1..8: note = Amino acid sequence
GFPPRSFA

SEQ ID NO: 5169 - protein, 8 aa, synthetic construct
  REGION 1..8: note = Amino acid sequence
GFTFSNYG

SEQ ID NO: 5170 - protein, 8 aa, synthetic construct
  REGION 1..8: note = Amino acid sequence
GFTFDDYT

SEQ ID NO: 5171 - protein, 8 aa, synthetic construct
  REGION 1..8: note = Amino acid sequence
GDTFPNYV

SEQ ID NO: 5172 - protein, 8 aa, synthetic construct
  REGION 1..8: note = Amino acid sequence
GFTFDDYA

SEQ ID NO: 5173 - protein, 8 aa, synthetic construct
  REGION 1..8: note = Amino acid sequence
GFTFSSYA

SEQ ID NO: 5174 - protein, 8 aa, synthetic construct
  REGION 1..8: note = Amino acid sequence
GFTFSNYD

SEQ ID NO: 5175 - protein, 8 aa, synthetic construct
  REGION 1..8: note = Amino acid sequence
GFTFSPYS

SEQ ID NO: 5176 - protein, 10 aa, synthetic construct
  REGION 1..10: note = Amino acid sequence
GGSITSGSYF

SEQ ID NO: 5177 - protein, 10 aa, synthetic construct
  REGION 1..10: note = Amino acid sequence
GGSVSSSSYY

SEQ ID NO: 5178 - protein, 8 aa, synthetic construct
  REGION 1..8: note = Amino acid sequence
GFTFSNYD

SEQ ID NO: 5179 - protein, 8 aa, synthetic construct
  REGION 1..8: note = Amino acid sequence
GYAFIGNW

SEQ ID NO: 5180 - protein, 10 aa, synthetic construct
  REGION 1..10: note = Amino acid sequence
GFTFSFSSYA

SEQ ID NO: 5181 - protein, 8 aa, synthetic construct
  REGION 1..8: note = Amino acid sequence
GFTFNNYE

SEQ ID NO: 5182 - protein, 8 aa, synthetic construct
  REGION 1..8: note = Amino acid sequence
GFTFSSNW

SEQ ID NO: 5183 - protein, 10 aa, synthetic construct
  REGION 1..10: note = Amino acid sequence
GGSISSGGYY

SEQ ID NO: 5184 - protein, 8 aa, synthetic construct
  REGION 1..8: note = Amino acid sequence
GFTFSSYG

SEQ ID NO: 5185 - protein, 8 aa, synthetic construct
  REGION 1..8: note = Amino acid sequence
GFTFSDYY

SEQ ID NO: 5186 - protein, 10 aa, synthetic construct
  REGION 1..10: note = Amino acid sequence
GGSISSGGYP

SEQ ID NO: 5187 - protein, 8 aa, synthetic construct
  REGION 1..8: note = Amino acid sequence
GGSISIYY

SEQ ID NO: 5188 - protein, 8 aa, synthetic construct
  REGION 1..8: note = Amino acid sequence
NSSISSYY

SEQ ID NO: 5189 - protein, 8 aa, synthetic construct
  REGION 1..8: note = Amino acid sequence
GFTFNSYW

SEQ ID NO: 5190 - protein, 8 aa, synthetic construct
  REGION 1..8: note = Amino acid sequence
GFTFDDYA

SEQ ID NO: 5191 - protein, 8 aa, synthetic construct
  REGION 1..8: note = Amino acid sequence
GYRFNAYW

SEQ ID NO: 5192 - protein, 10 aa, synthetic construct
  REGION 1..10: note = Amino acid sequence
GDSVSSTSGA

SEQ ID NO: 5193 - protein, 10 aa, synthetic construct
  REGION 1..10: note = Amino acid sequence
GDSVSSNSAA

SEQ ID NO: 5194 - protein, 8 aa, synthetic construct
  REGION 1..8: note = Amino acid sequence
GGSISSYY

SEQ ID NO: 5195 - protein, 8 aa, synthetic construct
  REGION 1..8: note = Amino acid sequence
GYSFTSYW

SEQ ID NO: 5196 - protein, 8 aa, synthetic construct
  REGION 1..8: note = Amino acid sequence
GFTFSSYG

SEQ ID NO: 5197 - protein, 8 aa, synthetic construct
  REGION 1..8: note = Amino acid sequence
GFTFRSYS

SEQ ID NO: 5198 - protein, 8 aa, synthetic construct
  REGION 1..8: note = Amino acid sequence
GGTFSSYT

SEQ ID NO: 5199 - protein, 8 aa, synthetic construct
  REGION 1..8: note = Amino acid sequence
GFSFSRYN

SEQ ID NO: 5200 - protein, 8 aa, synthetic construct
  REGION 1..8: note = Amino acid sequence
GFTFTNYA

SEQ ID NO: 5201 - protein, 8 aa, synthetic construct
  REGION 1..8: note = Amino acid sequence
GFSFSSFG

SEQ ID NO: 5202 - protein, 8 aa, synthetic construct
  REGION 1..8: note = Amino acid sequence
GFTFSSYA

SEQ ID NO: 5203 - protein, 8 aa, synthetic construct
  REGION 1..8: note = Amino acid sequence
GFTFSSHG

SEQ ID NO: 5204 - protein, 8 aa, synthetic construct
  REGION 1..8: note = Amino acid sequence
GFSFSTYW

SEQ ID NO: 5205 - protein, 8 aa, synthetic construct
  REGION 1..8: note = Amino acid sequence
GFTFNNYW

SEQ ID NO: 5206 - protein, 8 aa, synthetic construct
  REGION 1..8: note = Amino acid sequence
GFTFSHGW

SEQ ID NO: 5207 - protein, 8 aa, synthetic construct
  REGION 1..8: note = Amino acid sequence
GGSIRNDY

SEQ ID NO: 5208 - protein, 8 aa, synthetic construct
  REGION 1..8: note = Amino acid sequence
GGTFSSYA

SEQ ID NO: 5209 - protein, 10 aa, synthetic construct
  REGION 1..10: note = Amino acid sequence
GGSISSSNYF

SEQ ID NO: 5210 - protein, 8 aa, synthetic construct
  REGION 1..8: note = Amino acid sequence
GFTFSDYW

SEQ ID NO: 5211 - protein, 10 aa, synthetic construct
  REGION 1..10: note = Amino acid sequence
DVSIISSFYY

SEQ ID NO: 5212 - protein, 10 aa, synthetic construct
  REGION 1..10: note = Amino acid sequence
GASVSSGSYY

SEQ ID NO: 5213 - protein, 8 aa, synthetic construct
  REGION 1..8: note = Amino acid sequence
GGTFSGYG

SEQ ID NO: 5214 - protein, 8 aa, synthetic construct
  REGION 1..8: note = Amino acid sequence
GFTFSSYW

SEQ ID NO: 5215 - protein, 10 aa, synthetic construct
  REGION 1..10: note = Amino acid sequence
GGSISSGDYY

SEQ ID NO: 5216 - protein, 8 aa, synthetic construct
  REGION 1..8: note = Amino acid sequence
GFTFSSYA

SEQ ID NO: 5217 - protein, 8 aa, synthetic construct
  REGION 1..8: note = Amino acid sequence
GFTFSSYA

SEQ ID NO: 5218 - protein, 8 aa, synthetic construct
  REGION 1..8: note = Amino acid sequence
GFTLSSYA

SEQ ID NO: 5219 - protein, 10 aa, synthetic construct
  REGION 1..10: note = Amino acid sequence
GGSISSGGYS

SEQ ID NO: 5220 - protein, 8 aa, synthetic construct
  REGION 1..8: note = Amino acid sequence
GFTFSNSA

SEQ ID NO: 5221 - protein, 8 aa, synthetic construct
  REGION 1..8: note = Amino acid sequence
GYTFTSHY

SEQ ID NO: 5222 - protein, 8 aa, synthetic construct
  REGION 1..8: note = Amino acid sequence
GFTFSAYW

SEQ ID NO: 5223 - protein, 8 aa, synthetic construct
  REGION 1..8: note = Amino acid sequence
GYSLTEIS

SEQ ID NO: 5224 - protein, 10 aa, synthetic construct
  REGION 1..10: note = Amino acid sequence
GGSIRSSAPF

SEQ ID NO: 5225 - protein, 8 aa, synthetic construct
  REGION 1..8: note = Amino acid sequence
GYIFTTYV

SEQ ID NO: 5226 - protein, 8 aa, synthetic construct
  REGION 1..8: note = Amino acid sequence
GFTFDDYA

SEQ ID NO: 5227 - protein, 8 aa, synthetic construct
  REGION 1..8: note = Amino acid sequence
GFTFNNYW

SEQ ID NO: 5228 - protein, 8 aa, synthetic construct
  REGION 1..8: note = Amino acid sequence
GDSVSSFY

SEQ ID NO: 5229 - protein, 8 aa, synthetic construct
  REGION 1..8: note = Amino acid sequence
GYNFNDDR

SEQ ID NO: 5230 - protein, 8 aa, synthetic construct
  REGION 1..8: note = Amino acid sequence
GFTVSTNY

SEQ ID NO: 5231 - protein, 8 aa, synthetic construct
  REGION 1..8: note = Amino acid sequence
GFTFSDHY

SEQ ID NO: 5232 - protein, 8 aa, synthetic construct
  REGION 1..8: note = Amino acid sequence
GFTFRDYG

SEQ ID NO: 5233 - protein, 8 aa, synthetic construct
  REGION 1..8: note = Amino acid sequence
GFDIRSYT

SEQ ID NO: 5234 - protein, 8 aa, synthetic construct
  REGION 1..8: note = Amino acid sequence
GYTFTDYY

SEQ ID NO: 5235 - protein, 8 aa, synthetic construct
  REGION 1..8: note = Amino acid sequence
GFTFSNYA

SEQ ID NO: 5236 - protein, 8 aa, synthetic construct
  REGION 1..8: note = Amino acid sequence
GFNFNSYT

SEQ ID NO: 5237 - protein, 8 aa, synthetic construct
  REGION 1..8: note = Amino acid sequence
GFTFDDYA

SEQ ID NO: 5238 - protein, 8 aa, synthetic construct
  REGION 1..8: note = Amino acid sequence
GGTFSSYG

SEQ ID NO: 5239 - protein, 8 aa, synthetic construct
  REGION 1..8: note = Amino acid sequence
GLTFNRFA

SEQ ID NO: 5240 - protein, 9 aa, synthetic construct
  REGION 1..9: note = Amino acid sequence
GYSISTAYY

SEQ ID NO: 5241 - protein, 8 aa, synthetic construct
  REGION 1..8: note = Amino acid sequence
GGNVRSYS

SEQ ID NO: 5242 - protein, 8 aa, synthetic construct
  REGION 1..8: note = Amino acid sequence
GDSISSNY

SEQ ID NO: 5243 - protein, 8 aa, synthetic construct
  REGION 1..8: note = Amino acid sequence
GYRFSNFG

SEQ ID NO: 5244 - protein, 8 aa, synthetic construct
  REGION 1..8: note = Amino acid sequence
GYTFTNYA

SEQ ID NO: 5245 - protein, 10 aa, synthetic construct
  REGION 1..10: note = Amino acid sequence
GDSISSSSYF

SEQ ID NO: 5246 - protein, 8 aa, synthetic construct
  REGION 1..8: note = Amino acid sequence
GFTFSNYG

SEQ ID NO: 5247 - protein, 8 aa, synthetic construct
  REGION 1..8: note = Amino acid sequence
GGSFNTYA

SEQ ID NO: 5248 - protein, 8 aa, synthetic construct
  REGION 1..8: note = Amino acid sequence
GDTFTSFA

SEQ ID NO: 5249 - protein, 10 aa, synthetic construct
  REGION 1..10: note = Amino acid sequence
GDSISNGDYC

SEQ ID NO: 5250 - protein, 8 aa, synthetic construct
  REGION 1..8: note = Amino acid sequence
GFTFRSYW

SEQ ID NO: 5251 - protein, 8 aa, synthetic construct
  REGION 1..8: note = Amino acid sequence
GFTYDSYV

SEQ ID NO: 5252 - protein, 10 aa, synthetic construct
  REGION 1..10: note = Amino acid sequence
SGSVSSGSHY

SEQ ID NO: 5253 - protein, 8 aa, synthetic construct
  REGION 1..8: note = Amino acid sequence
GYSFTGYY

SEQ ID NO: 5254 - protein, 8 aa, synthetic construct
  REGION 1..8: note = Amino acid sequence
GFTFSNYG

SEQ ID NO: 5255 - protein, 8 aa, synthetic construct
  REGION 1..8: note = Amino acid sequence
GFTFSNYN

SEQ ID NO: 5256 - protein, 10 aa, synthetic construct
  REGION 1..10: note = Amino acid sequence
GGSISSSSYY

SEQ ID NO: 5257 - protein, 8 aa, synthetic construct
  REGION 1..8: note = Amino acid sequence
GFTFSNAW

SEQ ID NO: 5258 - protein, 8 aa, synthetic construct
  REGION 1..8: note = Amino acid sequence
GYTFTNYF

SEQ ID NO: 5259 - protein, 8 aa, synthetic construct
  REGION 1..8: note = Amino acid sequence
GGTFNNYG

SEQ ID NO: 5260 - protein, 8 aa, synthetic construct
  REGION 1..8: note = Amino acid sequence
GFTFSSYE

SEQ ID NO: 5261 - protein, 8 aa, synthetic construct
  REGION 1..8: note = Amino acid sequence
GFTFTTYA

SEQ ID NO: 5262 - protein, 8 aa, synthetic construct
  REGION 1..8: note = Amino acid sequence
GYTFTSYW

SEQ ID NO: 5263 - protein, 8 aa, synthetic construct
  REGION 1..8: note = Amino acid sequence
GLTFSIYS

SEQ ID NO: 5264 - protein, 10 aa, synthetic construct
  REGION 1..10: note = Amino acid sequence
GFSLSNARMG

SEQ ID NO: 5265 - protein, 8 aa, synthetic construct
  REGION 1..8: note = Amino acid sequence
GYTFTVYY

SEQ ID NO: 5266 - protein, 8 aa, synthetic construct
  REGION 1..8: note = Amino acid sequence
GYTFTSYG

SEQ ID NO: 5267 - protein, 10 aa, synthetic construct
  REGION 1..10: note = Amino acid sequence
GDSVSSTSAA

SEQ ID NO: 5268 - protein, 9 aa, synthetic construct
  REGION 1..9: note = Amino acid sequence
GGSISSSNC

SEQ ID NO: 5269 - protein, 8 aa, synthetic construct
  REGION 1..8: note = Amino acid sequence
GFTVSSNY

SEQ ID NO: 5270 - protein, 8 aa, synthetic construct
  REGION 1..8: note = Amino acid sequence
GYTFTTYY

SEQ ID NO: 5271 - protein, 10 aa, synthetic construct
  REGION 1..10: note = Amino acid sequence
GGSVSSGSYY

SEQ ID NO: 5272 - protein, 10 aa, synthetic construct
  REGION 1..10: note = Amino acid sequence
GGSISSSFFY

SEQ ID NO: 5273 - protein, 8 aa, synthetic construct
  REGION 1..8: note = Amino acid sequence
GFTFSSYA

SEQ ID NO: 5274 - protein, 8 aa, synthetic construct
  REGION 1..8: note = Amino acid sequence
GFTFSTYV

SEQ ID NO: 5275 - protein, 10 aa, synthetic construct
  REGION 1..10: note = Amino acid sequence
GGSISSSSYY

SEQ ID NO: 5276 - protein, 8 aa, synthetic construct
  REGION 1..8: note = Amino acid sequence
GYTFTGYY

SEQ ID NO: 5277 - protein, 8 aa, synthetic construct
  REGION 1..8: note = Amino acid sequence
GYSFTSYW

SEQ ID NO: 5278 - protein, 8 aa, synthetic construct
  REGION 1..8: note = Amino acid sequence
GYSFTTYW

SEQ ID NO: 5279 - protein, 8 aa, synthetic construct
  REGION 1..8: note = Amino acid sequence
GFTFRIYA

SEQ ID NO: 5280 - protein, 8 aa, synthetic construct
  REGION 1..8: note = Amino acid sequence
GYTFTSYY

SEQ ID NO: 5281 - protein, 8 aa, synthetic construct
  REGION 1..8: note = Amino acid sequence
GLDFRDYY

SEQ ID NO: 5282 - protein, 8 aa, synthetic construct
  REGION 1..8: note = Amino acid sequence
GFTFISYA

SEQ ID NO: 5283 - protein, 8 aa, synthetic construct
  REGION 1..8: note = Amino acid sequence
GYTFTSHA

SEQ ID NO: 5284 - protein, 8 aa, synthetic construct
  REGION 1..8: note = Amino acid sequence
GYTFTNYA

SEQ ID NO: 5285 - protein, 8 aa, synthetic construct
  REGION 1..8: note = Amino acid sequence
GFTFSNFA

SEQ ID NO: 5286 - protein, 8 aa, synthetic construct
  REGION 1..8: note = Amino acid sequence
GFTFSHYA

SEQ ID NO: 5287 - protein, 8 aa, synthetic construct
  REGION 1..8: note = Amino acid sequence
GFTFSSYS

SEQ ID NO: 5288 - protein, 10 aa, synthetic construct
  REGION 1..10: note = Amino acid sequence
GFSLSTNGVG

SEQ ID NO: 5289 - protein, 10 aa, synthetic construct
  REGION 1..10: note = Amino acid sequence
GLSLSTSGVA

SEQ ID NO: 5290 - protein, 10 aa, synthetic construct
  REGION 1..10: note = Amino acid sequence
GGSISSGGYC

SEQ ID NO: 5291 - protein, 8 aa, synthetic construct
  REGION 1..8: note = Amino acid sequence
GFTFSSYW

SEQ ID NO: 5292 - protein, 8 aa, synthetic construct
  REGION 1..8: note = Amino acid sequence
RGTFSNHA

SEQ ID NO: 5293 - protein, 8 aa, synthetic construct
  REGION 1..8: note = Amino acid sequence
GGTFNFYA

SEQ ID NO: 5294 - protein, 8 aa, synthetic construct
  REGION 1..8: note = Amino acid sequence
GYNFIDNA

SEQ ID NO: 5295 - protein, 8 aa, synthetic construct
  REGION 1..8: note = Amino acid sequence
GYTFTHYG

SEQ ID NO: 5296 - protein, 8 aa, synthetic construct
  REGION 1..8: note = Amino acid sequence
GFTFSNYA

SEQ ID NO: 5297 - protein, 8 aa, synthetic construct
  REGION 1..8: note = Amino acid sequence
GYTFSSYY

SEQ ID NO: 5298 - protein, 8 aa, synthetic construct
  REGION 1..8: note = Amino acid sequence
GYNFSRYW

SEQ ID NO: 5299 - protein, 8 aa, synthetic construct
  REGION 1..8: note = Amino acid sequence
GFTFNRYG

SEQ ID NO: 5300 - protein, 8 aa, synthetic construct
  REGION 1..8: note = Amino acid sequence
GYSFTSFW

SEQ ID NO: 5301 - protein, 8 aa, synthetic construct
  REGION 1..8: note = Amino acid sequence
GFTLDDYV

SEQ ID NO: 5302 - protein, 10 aa, synthetic construct
  REGION 1..10: note = Amino acid sequence
GDSISSSGFF

SEQ ID NO: 5303 - protein, 8 aa, synthetic construct
  REGION 1..8: note = Amino acid sequence
GGPFKTYP

SEQ ID NO: 5304 - protein, 8 aa, synthetic construct
  REGION 1..8: note = Amino acid sequence
GFTFGDNA

SEQ ID NO: 5305 - protein, 8 aa, synthetic construct
  REGION 1..8: note = Amino acid sequence
GYTFSNYG

SEQ ID NO: 5306 - protein, 8 aa, synthetic construct
  REGION 1..8: note = Amino acid sequence
GFDFTSYW

SEQ ID NO: 5307 - protein, 8 aa, synthetic construct
  REGION 1..8: note = Amino acid sequence
GFTFSSYS

SEQ ID NO: 5308 - protein, 10 aa, synthetic construct
  REGION 1..10: note = Amino acid sequence
GVSIGTSSYY

SEQ ID NO: 5309 - protein, 8 aa, synthetic construct
  REGION 1..8: note = Amino acid sequence
GDSFSDYY

SEQ ID NO: 5310 - protein, 8 aa, synthetic construct
  REGION 1..8: note = Amino acid sequence
GFTFSNYA

SEQ ID NO: 5311 - protein, 8 aa, synthetic construct
  REGION 1..8: note = Amino acid sequence
GYRFTSNG

SEQ ID NO: 5312 - protein, 8 aa, synthetic construct
  REGION 1..8: note = Amino acid sequence
GFTFDDYG

SEQ ID NO: 5313 - protein, 8 aa, synthetic construct
  REGION 1..8: note = Amino acid sequence
GFSFSAYG

SEQ ID NO: 5314 - protein, 8 aa, synthetic construct
  REGION 1..8: note = Amino acid sequence
EFTFSAYA

SEQ ID NO: 5315 - protein, 8 aa, synthetic construct
  REGION 1..8: note = Amino acid sequence
GFTFSNAW

SEQ ID NO: 5316 - protein, 8 aa, synthetic construct
  REGION 1..8: note = Amino acid sequence
GLTFSDYG

SEQ ID NO: 5317 - protein, 8 aa, synthetic construct
  REGION 1..8: note = Amino acid sequence
GYVFTSFG

SEQ ID NO: 5318 - protein, 8 aa, synthetic construct
  REGION 1..8: note = Amino acid sequence
GFTFEDFG

SEQ ID NO: 5319 - protein, 8 aa, synthetic construct
  REGION 1..8: note = Amino acid sequence
GFTLSTYG

SEQ ID NO: 5320 - protein, 8 aa, synthetic construct
  REGION 1..8: note = Amino acid sequence
GYTFSNYA

SEQ ID NO: 5321 - protein, 8 aa, synthetic construct
  REGION 1..8: note = Amino acid sequence
GYSFSTYW

SEQ ID NO: 5322 - protein, 10 aa, synthetic construct
  REGION 1..10: note = Amino acid sequence
GFSLTTYGVG

SEQ ID NO: 5323 - protein, 8 aa, synthetic construct
  REGION 1..8: note = Amino acid sequence
GFTFSAYG

SEQ ID NO: 5324 - protein, 8 aa, synthetic construct
  REGION 1..8: note = Amino acid sequence
GGTFSEYG

SEQ ID NO: 5325 - protein, 10 aa, synthetic construct
  REGION 1..10: note = Amino acid sequence
GASVNSGTHF

SEQ ID NO: 5326 - protein, 8 aa, synthetic construct
  REGION 1..8: note = Amino acid sequence
GFTFSSYA

SEQ ID NO: 5327 - protein, 8 aa, synthetic construct
  REGION 1..8: note = Amino acid sequence
GFTFSSYS

SEQ ID NO: 5328 - protein, 10 aa, synthetic construct
  REGION 1..10: note = Amino acid sequence
GDSISRSNYY

SEQ ID NO: 5329 - protein, 8 aa, synthetic construct
  REGION 1..8: note = Amino acid sequence
GFTFSKFW

SEQ ID NO: 5330 - protein, 10 aa, synthetic construct
  REGION 1..10: note = Amino acid sequence
GFSLTTTGVG

SEQ ID NO: 5331 - protein, 8 aa, synthetic construct
  REGION 1..8: note = Amino acid sequence
GFIFSSYG

SEQ ID NO: 5332 - protein, 8 aa, synthetic construct
  REGION 1..8: note = Amino acid sequence
GFTFSSYE

SEQ ID NO: 5333 - protein, 8 aa, synthetic construct
  REGION 1..8: note = Amino acid sequence
GFTFSSYS

SEQ ID NO: 5334 - protein, 10 aa, synthetic construct
  REGION 1..10: note = Amino acid sequence
GFSLSTSGMC

SEQ ID NO: 5335 - protein, 8 aa, synthetic construct
  REGION 1..8: note = Amino acid sequence
GFTFSSYW

SEQ ID NO: 5336 - protein, 8 aa, synthetic construct
  REGION 1..8: note = Amino acid sequence
GFTFASYG

SEQ ID NO: 5337 - protein, 8 aa, synthetic construct
  REGION 1..8: note = Amino acid sequence
GFTFSSYS

SEQ ID NO: 5338 - protein, 8 aa, synthetic construct
  REGION 1..8: note = Amino acid sequence
GYIFTGSF

SEQ ID NO: 5339 - protein, 10 aa, synthetic construct
  REGION 1..10: note = Amino acid sequence
GGSISSGTYY

SEQ ID NO: 5340 - protein, 8 aa, synthetic construct
  REGION 1..8: note = Amino acid sequence
GYSFTNYW

SEQ ID NO: 5341 - protein, 8 aa, synthetic construct
  REGION 1..8: note = Amino acid sequence
GFTFSNAW

SEQ ID NO: 5342 - protein, 8 aa, synthetic construct
  REGION 1..8: note = Amino acid sequence
GFPFSTYA

SEQ ID NO: 5343 - protein, 8 aa, synthetic construct
  REGION 1..8: note = Amino acid sequence
GFSFSGSS

SEQ ID NO: 5344 - protein, 8 aa, synthetic construct
  REGION 1..8: note = Amino acid sequence
GGSISSYY

SEQ ID NO: 5345 - protein, 8 aa, synthetic construct
  REGION 1..8: note = Amino acid sequence
GFTFGDYA

SEQ ID NO: 5346 - protein, 8 aa, synthetic construct
  REGION 1..8: note = Amino acid sequence
GFTLSNYG

SEQ ID NO: 5347 - protein, 8 aa, synthetic construct
  REGION 1..8: note = Amino acid sequence
GFSITTHS

SEQ ID NO: 5348 - protein, 8 aa, synthetic construct
  REGION 1..8: note = Amino acid sequence
GFTFSSYE

SEQ ID NO: 5349 - protein, 8 aa, synthetic construct
  REGION 1..8: note = Amino acid sequence
GFTFSSYS

SEQ ID NO: 5350 - protein, 8 aa, synthetic construct
  REGION 1..8: note = Amino acid sequence
GFSVSSKY

SEQ ID NO: 5351 - protein, 8 aa, synthetic construct
  REGION 1..8: note = Amino acid sequence
GYSFTNYW

SEQ ID NO: 5352 - protein, 8 aa, synthetic construct
  REGION 1..8: note = Amino acid sequence
GFTFSGSA

SEQ ID NO: 5353 - protein, 8 aa, synthetic construct
  REGION 1..8: note = Amino acid sequence
GFTFSDYG

SEQ ID NO: 5354 - protein, 8 aa, synthetic construct
  REGION 1..8: note = Amino acid sequence
GYTFNNYG

SEQ ID NO: 5355 - protein, 6 aa, synthetic construct
  REGION 1..6: note = Amino acid sequence
QGVSSY

SEQ ID NO: 5356 - protein, 6 aa, synthetic construct
  REGION 1..6: note = Amino acid sequence
QSIGSY

SEQ ID NO: 5357 - protein, 6 aa, synthetic construct
  REGION 1..6: note = Amino acid sequence
QGIDVW

SEQ ID NO: 5358 - protein, 8 aa, synthetic construct
  REGION 1..8: note = Amino acid sequence
SSNIGSNY

SEQ ID NO: 5359 - protein, 6 aa, synthetic construct
  REGION 1..6: note = Amino acid sequence
SLRNYY

SEQ ID NO: 5360 - protein, 6 aa, synthetic construct
  REGION 1..6: note = Amino acid sequence
NIGIKS

SEQ ID NO: 5361 - protein, 6 aa, synthetic construct
  REGION 1..6: note = Amino acid sequence
QSISSY

SEQ ID NO: 5362 - protein, 7 aa, synthetic construct
  REGION 1..7: note = Amino acid sequence
QSVSSSY

SEQ ID NO: 5363 - protein, 8 aa, synthetic construct
  REGION 1..8: note = Amino acid sequence
SGNIASYY

SEQ ID NO: 5364 - protein, 7 aa, synthetic construct
  REGION 1..7: note = Amino acid sequence
QSVSSSY

SEQ ID NO: 5365 - protein, 8 aa, synthetic construct
  REGION 1..8: note = Amino acid sequence
SSNIENND

SEQ ID NO: 5366 - protein, 11 aa, synthetic construct
  REGION 1..11: note = Amino acid sequence
QSLVHSDGNTY

SEQ ID NO: 5367 - protein, 8 aa, synthetic construct
  REGION 1..8: note = Amino acid sequence
SSNIGRNY

SEQ ID NO: 5368 - protein, 8 aa, synthetic construct
  REGION 1..8: note = Amino acid sequence
ISNIGSNP

SEQ ID NO: 5369 - protein, 6 aa, synthetic construct
  REGION 1..6: note = Amino acid sequence
QNVNFN

SEQ ID NO: 5370 - protein, 7 aa, synthetic construct
  REGION 1..7: note = Amino acid sequence
QSVSSSS

SEQ ID NO: 5371 - protein, 6 aa, synthetic construct
  REGION 1..6: note = Amino acid sequence
ALPKQY

SEQ ID NO: 5372 - protein, 6 aa, synthetic construct
  REGION 1..6: note = Amino acid sequence
QSVSSY

SEQ ID NO: 5373 - protein, 6 aa, synthetic construct
  REGION 1..6: note = Amino acid sequence
QSVGSY

SEQ ID NO: 5374 - protein, 6 aa, synthetic construct
  REGION 1..6: note = Amino acid sequence
QAIANS

SEQ ID NO: 5375 - protein, 12 aa, synthetic construct
  REGION 1..12: note = Amino acid sequence
QSVLYSSNNENY

SEQ ID NO: 5376 - protein, 6 aa, synthetic construct
  REGION 1..6: note = Amino acid sequence
HNINTY

SEQ ID NO: 5377 - protein, 9 aa, synthetic construct
  REGION 1..9: note = Amino acid sequence
SSDVGGYNY

SEQ ID NO: 5378 - protein, 8 aa, synthetic construct
  REGION 1..8: note = Amino acid sequence
SANIGKNY

SEQ ID NO: 5379 - protein, 6 aa, synthetic construct
  REGION 1..6: note = Amino acid sequence
QSISTY

SEQ ID NO: 5380 - protein, 6 aa, synthetic construct
  REGION 1..6: note = Amino acid sequence
QSIKNY

SEQ ID NO: 5381 - protein, 9 aa, synthetic construct
  REGION 1..9: note = Amino acid sequence
SSNIGAGYD

SEQ ID NO: 5382 - protein, 6 aa, synthetic construct
  REGION 1..6: note = Amino acid sequence
NIGSKT

SEQ ID NO: 5383 - protein, 6 aa, synthetic construct
  REGION 1..6: note = Amino acid sequence
QDISNW

SEQ ID NO: 5384 - protein, 6 aa, synthetic construct
  REGION 1..6: note = Amino acid sequence
ALPNEN

SEQ ID NO: 5385 - protein, 9 aa, synthetic construct
  REGION 1..9: note = Amino acid sequence
TSDIGSYDR

SEQ ID NO: 5386 - protein, 8 aa, synthetic construct
  REGION 1..8: note = Amino acid sequence
SSNIGNNY

SEQ ID NO: 5387 - protein, 11 aa, synthetic construct
  REGION 1..11: note = Amino acid sequence
QSLVYSDGNTY

SEQ ID NO: 5388 - protein, 7 aa, synthetic construct
  REGION 1..7: note = Amino acid sequence
QSIRSSY

SEQ ID NO: 5389 - protein, 9 aa, synthetic construct
  REGION 1..9: note = Amino acid sequence
TSNIGAGYD

SEQ ID NO: 5390 - protein, 6 aa, synthetic construct
  REGION 1..6: note = Amino acid sequence
QSISSY

SEQ ID NO: 5391 - protein, 12 aa, synthetic construct
  REGION 1..12: note = Amino acid sequence
QNVLYSSNNKNY

SEQ ID NO: 5392 - protein, 9 aa, synthetic construct
  REGION 1..9: note = Amino acid sequence
SSNIGAGYD

SEQ ID NO: 5393 - protein, 8 aa, synthetic construct
  REGION 1..8: note = Amino acid sequence
SGSIASSY

SEQ ID NO: 5394 - protein, 6 aa, synthetic construct
  REGION 1..6: note = Amino acid sequence
QSISSY

SEQ ID NO: 5395 - protein, 6 aa, synthetic construct
  REGION 1..6: note = Amino acid sequence
NIGSKS

SEQ ID NO: 5396 - protein, 9 aa, synthetic construct
  REGION 1..9: note = Amino acid sequence
SSDVGGYNY

SEQ ID NO: 5397 - protein, 6 aa, synthetic construct
  REGION 1..6: note = Amino acid sequence
QSISSY

SEQ ID NO: 5398 - protein, 6 aa, synthetic construct
  REGION 1..6: note = Amino acid sequence
QGINSA

SEQ ID NO: 5399 - protein, 6 aa, synthetic construct
  REGION 1..6: note = Amino acid sequence
SLRRYY

SEQ ID NO: 5400 - protein, 6 aa, synthetic construct
  REGION 1..6: note = Amino acid sequence
QGIRNW

SEQ ID NO: 5401 - protein, 6 aa, synthetic construct
  REGION 1..6: note = Amino acid sequence
QSVGTY

SEQ ID NO: 5402 - protein, 7 aa, synthetic construct
  REGION 1..7: note = Amino acid sequence
QSVSSNY

SEQ ID NO: 5403 - protein, 7 aa, synthetic construct
  REGION 1..7: note = Amino acid sequence
QSVSSRY

SEQ ID NO: 5404 - protein, 6 aa, synthetic construct
  REGION 1..6: note = Amino acid sequence
QSVGSS

SEQ ID NO: 5405 - protein, 6 aa, synthetic construct
  REGION 1..6: note = Amino acid sequence
QSISSW

SEQ ID NO: 5406 - protein, 6 aa, synthetic construct
  REGION 1..6: note = Amino acid sequence
NIGSKS

SEQ ID NO: 5407 - protein, 6 aa, synthetic construct
  REGION 1..6: note = Amino acid sequence
QSVSTY

SEQ ID NO: 5408 - protein, 11 aa, synthetic construct
  REGION 1..11: note = Amino acid sequence
QSLLHSNGYNY

SEQ ID NO: 5409 - protein, 6 aa, synthetic construct
  REGION 1..6: note = Amino acid sequence
QSISSW

SEQ ID NO: 5410 - protein, 9 aa, synthetic construct
  REGION 1..9: note = Amino acid sequence
SGSVSTGNY

SEQ ID NO: 5411 - protein, 7 aa, synthetic construct
  REGION 1..7: note = Amino acid sequence
QSVSSSY

SEQ ID NO: 5412 - protein, 6 aa, synthetic construct
  REGION 1..6: note = Amino acid sequence
NIGSKS

SEQ ID NO: 5413 - protein, 6 aa, synthetic construct
  REGION 1..6: note = Amino acid sequence
QSISRW

SEQ ID NO: 5414 - protein, 6 aa, synthetic construct
  REGION 1..6: note = Amino acid sequence
QDIDDD

SEQ ID NO: 5415 - protein, 7 aa, synthetic construct
  REGION 1..7: note = Amino acid sequence
QSIGAAY

SEQ ID NO: 5416 - protein, 6 aa, synthetic construct
  REGION 1..6: note = Amino acid sequence
ALPKKY

SEQ ID NO: 5417 - protein, 11 aa, synthetic construct
  REGION 1..11: note = Amino acid sequence
QSLLHSDGYNY

SEQ ID NO: 5418 - protein, 9 aa, synthetic construct
  REGION 1..9: note = Amino acid sequence
SSDVGGYNY

SEQ ID NO: 5419 - protein, 6 aa, synthetic construct
  REGION 1..6: note = Amino acid sequence
QSISSN

SEQ ID NO: 5420 - protein, 9 aa, synthetic construct
  REGION 1..9: note = Amino acid sequence
SSDVGGYNY

SEQ ID NO: 5421 - protein, 11 aa, synthetic construct
  REGION 1..11: note = Amino acid sequence
QRLLHSDGKTY

SEQ ID NO: 5422 - protein, 7 aa, synthetic construct
  REGION 1..7: note = Amino acid sequence
QSVSSSF

SEQ ID NO: 5423 - protein, 6 aa, synthetic construct
  REGION 1..6: note = Amino acid sequence
QDVDTY

SEQ ID NO: 5424 - protein, 8 aa, synthetic construct
  REGION 1..8: note = Amino acid sequence
SSNIGKYS

SEQ ID NO: 5425 - protein, 6 aa, synthetic construct
  REGION 1..6: note = Amino acid sequence
QSVGSS

SEQ ID NO: 5426 - protein, 7 aa, synthetic construct
  REGION 1..7: note = Amino acid sequence
QSVSSSY

SEQ ID NO: 5427 - protein, 6 aa, synthetic construct
  REGION 1..6: note = Amino acid sequence
QSISVW

SEQ ID NO: 5428 - protein, 6 aa, synthetic construct
  REGION 1..6: note = Amino acid sequence
SLRRYY

SEQ ID NO: 5429 - protein, 6 aa, synthetic construct
  REGION 1..6: note = Amino acid sequence
QSISSY

SEQ ID NO: 5430 - protein, 7 aa, synthetic construct
  REGION 1..7: note = Amino acid sequence
QSVSSSY

SEQ ID NO: 5431 - protein, 8 aa, synthetic construct
  REGION 1..8: note = Amino acid sequence
SSNIDNNY

SEQ ID NO: 5432 - protein, 6 aa, synthetic construct
  REGION 1..6: note = Amino acid sequence
QTISTY

SEQ ID NO: 5433 - protein, 12 aa, synthetic construct
  REGION 1..12: note = Amino acid sequence
QTVLHSSNNRNY

SEQ ID NO: 5434 - protein, 6 aa, synthetic construct
  REGION 1..6: note = Amino acid sequence
QSVDGN

SEQ ID NO: 5435 - protein, 6 aa, synthetic construct
  REGION 1..6: note = Amino acid sequence
QSISNY

SEQ ID NO: 5436 - protein, 9 aa, synthetic construct
  REGION 1..9: note = Amino acid sequence
SSNIGAGYD

SEQ ID NO: 5437 - protein, 6 aa, synthetic construct
  REGION 1..6: note = Amino acid sequence
QSVSTN

SEQ ID NO: 5438 - protein, 6 aa, synthetic construct
  REGION 1..6: note = Amino acid sequence
QSVSGY

SEQ ID NO: 5439 - protein, 8 aa, synthetic construct
  REGION 1..8: note = Amino acid sequence
RSNVASHA

SEQ ID NO: 5440 - protein, 12 aa, synthetic construct
  REGION 1..12: note = Amino acid sequence
QSLLDSDDGKTY

SEQ ID NO: 5441 - protein, 6 aa, synthetic construct
  REGION 1..6: note = Amino acid sequence
KLGDKY

SEQ ID NO: 5442 - protein, 6 aa, synthetic construct
  REGION 1..6: note = Amino acid sequence
KLGDIC

SEQ ID NO: 5443 - protein, 12 aa, synthetic construct
  REGION 1..12: note = Amino acid sequence
QSLFYSSNNKNY

SEQ ID NO: 5444 - protein, 6 aa, synthetic construct
  REGION 1..6: note = Amino acid sequence
QSVSSY

SEQ ID NO: 5445 - protein, 6 aa, synthetic construct
  REGION 1..6: note = Amino acid sequence
QSVSNY

SEQ ID NO: 5446 - protein, 11 aa, synthetic construct
  REGION 1..11: note = Amino acid sequence
QSLLQSNGNNY

SEQ ID NO: 5447 - protein, 6 aa, synthetic construct
  REGION 1..6: note = Amino acid sequence
QSISGW

SEQ ID NO: 5448 - protein, 8 aa, synthetic construct
  REGION 1..8: note = Amino acid sequence
SSNIGNNY

SEQ ID NO: 5449 - protein, 6 aa, synthetic construct
  REGION 1..6: note = Amino acid sequence
QSVSNY

SEQ ID NO: 5450 - protein, 11 aa, synthetic construct
  REGION 1..11: note = Amino acid sequence
QSLLRRDGNNY

SEQ ID NO: 5451 - protein, 9 aa, synthetic construct
  REGION 1..9: note = Amino acid sequence
SSDVGGFNY

SEQ ID NO: 5452 - protein, 11 aa, synthetic construct
  REGION 1..11: note = Amino acid sequence
QSLVYSDGNTY

SEQ ID NO: 5453 - protein, 6 aa, synthetic construct
  REGION 1..6: note = Amino acid sequence
QSISSY

SEQ ID NO: 5454 - protein, 6 aa, synthetic construct
  REGION 1..6: note = Amino acid sequence
QDISNY

SEQ ID NO: 5455 - protein, 6 aa, synthetic construct
  REGION 1..6: note = Amino acid sequence
NIGSKS

SEQ ID NO: 5456 - protein, 6 aa, synthetic construct
  REGION 1..6: note = Amino acid sequence
QVISDY

SEQ ID NO: 5457 - protein, 6 aa, synthetic construct
  REGION 1..6: note = Amino acid sequence
QSISTY

SEQ ID NO: 5458 - protein, 6 aa, synthetic construct
  REGION 1..6: note = Amino acid sequence
QRISNW

SEQ ID NO: 5459 - protein, 11 aa, synthetic construct
  REGION 1..11: note = Amino acid sequence
QSLLNPDGKTY

SEQ ID NO: 5460 - protein, 6 aa, synthetic construct
  REGION 1..6: note = Amino acid sequence
QSISGY

SEQ ID NO: 5461 - protein, 9 aa, synthetic construct
  REGION 1..9: note = Amino acid sequence
SSNVGADYD

SEQ ID NO: 5462 - protein, 6 aa, synthetic construct
  REGION 1..6: note = Amino acid sequence
QSVSSS

SEQ ID NO: 5463 - protein, 7 aa, synthetic construct
  REGION 1..7: note = Amino acid sequence
QSFDGKS

SEQ ID NO: 5464 - protein, 12 aa, synthetic construct
  REGION 1..12: note = Amino acid sequence
QSILYSSNNKDS

SEQ ID NO: 5465 - protein, 7 aa, synthetic construct
  REGION 1..7: note = Amino acid sequence
QSVSGSH

SEQ ID NO: 5466 - protein, 9 aa, synthetic construct
  REGION 1..9: note = Amino acid sequence
SSDVGGYNY

SEQ ID NO: 5467 - protein, 6 aa, synthetic construct
  REGION 1..6: note = Amino acid sequence
ALPKKY

SEQ ID NO: 5468 - protein, 6 aa, synthetic construct
  REGION 1..6: note = Amino acid sequence
QSVSSN

SEQ ID NO: 5469 - protein, 7 aa, synthetic construct
  REGION 1..7: note = Amino acid sequence
QSVSSSY

SEQ ID NO: 5470 - protein, 9 aa, synthetic construct
  REGION 1..9: note = Amino acid sequence
SSDVGLYNF

SEQ ID NO: 5471 - protein, 9 aa, synthetic construct
  REGION 1..9: note = Amino acid sequence
NSNIGAGYY

SEQ ID NO: 5472 - protein, 7 aa, synthetic construct
  REGION 1..7: note = Amino acid sequence
QSVTSSY

SEQ ID NO: 5473 - protein, 8 aa, synthetic construct
  REGION 1..8: note = Amino acid sequence
SSNIGDNF

SEQ ID NO: 5474 - protein, 6 aa, synthetic construct
  REGION 1..6: note = Amino acid sequence
QDIDDD

SEQ ID NO: 5475 - protein, 6 aa, synthetic construct
  REGION 1..6: note = Amino acid sequence
QSVGSW

SEQ ID NO: 5476 - protein, 6 aa, synthetic construct
  REGION 1..6: note = Amino acid sequence
QDISSF

SEQ ID NO: 5477 - protein, 6 aa, synthetic construct
  REGION 1..6: note = Amino acid sequence
SLRDYS

SEQ ID NO: 5478 - protein, 6 aa, synthetic construct
  REGION 1..6: note = Amino acid sequence
QSVSAY

SEQ ID NO: 5479 - protein, 6 aa, synthetic construct
  REGION 1..6: note = Amino acid sequence
NIGSKS

SEQ ID NO: 5480 - protein, 9 aa, synthetic construct
  REGION 1..9: note = Amino acid sequence
SSDVGNYNL

SEQ ID NO: 5481 - protein, 6 aa, synthetic construct
  REGION 1..6: note = Amino acid sequence
QSVRSH

SEQ ID NO: 5482 - protein, 6 aa, synthetic construct
  REGION 1..6: note = Amino acid sequence
SLRSYY

SEQ ID NO: 5483 - protein, 7 aa, synthetic construct
  REGION 1..7: note = Amino acid sequence
QAIVSNY

SEQ ID NO: 5484 - protein, 6 aa, synthetic construct
  REGION 1..6: note = Amino acid sequence
NIGKKD

SEQ ID NO: 5485 - protein, 6 aa, synthetic construct
  REGION 1..6: note = Amino acid sequence
NIGSKS

SEQ ID NO: 5486 - protein, 6 aa, synthetic construct
  REGION 1..6: note = Amino acid sequence
ALPKQS

SEQ ID NO: 5487 - protein, 6 aa, synthetic construct
  REGION 1..6: note = Amino acid sequence
ALPKQY

SEQ ID NO: 5488 - protein, 6 aa, synthetic construct
  REGION 1..6: note = Amino acid sequence
ALPKKY

SEQ ID NO: 5489 - protein, 6 aa, synthetic construct
  REGION 1..6: note = Amino acid sequence
QTIDTY

SEQ ID NO: 5490 - protein, 6 aa, synthetic construct
  REGION 1..6: note = Amino acid sequence
QGITNY

SEQ ID NO: 5491 - protein, 6 aa, synthetic construct
  REGION 1..6: note = Amino acid sequence
QDISTF

SEQ ID NO: 5492 - protein, 9 aa, synthetic construct
  REGION 1..9: note = Amino acid sequence
SSDIGGYNY

SEQ ID NO: 5493 - protein, 6 aa, synthetic construct
  REGION 1..6: note = Amino acid sequence
KLGDKY

SEQ ID NO: 5494 - protein, 8 aa, synthetic construct
  REGION 1..8: note = Amino acid sequence
TSNIGNNF

SEQ ID NO: 5495 - protein, 7 aa, synthetic construct
  REGION 1..7: note = Amino acid sequence
QSISSTY

SEQ ID NO: 5496 - protein, 7 aa, synthetic construct
  REGION 1..7: note = Amino acid sequence
QSVSSSY

SEQ ID NO: 5497 - protein, 9 aa, synthetic construct
  REGION 1..9: note = Amino acid sequence
SSDVGDYNY

SEQ ID NO: 5498 - protein, 6 aa, synthetic construct
  REGION 1..6: note = Amino acid sequence
QFISVY

SEQ ID NO: 5499 - protein, 6 aa, synthetic construct
  REGION 1..6: note = Amino acid sequence
QSVSSK

SEQ ID NO: 5500 - protein, 6 aa, synthetic construct
  REGION 1..6: note = Amino acid sequence
VLAKNY

SEQ ID NO: 5501 - protein, 9 aa, synthetic construct
  REGION 1..9: note = Amino acid sequence
SSDVGAYPY

SEQ ID NO: 5502 - protein, 7 aa, synthetic construct
  REGION 1..7: note = Amino acid sequence
QSLSSGY

SEQ ID NO: 5503 - protein, 12 aa, synthetic construct
  REGION 1..12: note = Amino acid sequence
QSLLYRSNDKNY

SEQ ID NO: 5504 - protein, 9 aa, synthetic construct
  REGION 1..9: note = Amino acid sequence
GSNIGAGYD

SEQ ID NO: 5505 - protein, 9 aa, synthetic construct
  REGION 1..9: note = Amino acid sequence
SSDVGGYDH

SEQ ID NO: 5506 - protein, 6 aa, synthetic construct
  REGION 1..6: note = Amino acid sequence
QSISSW

SEQ ID NO: 5507 - protein, 6 aa, synthetic construct
  REGION 1..6: note = Amino acid sequence
QSIVTN

SEQ ID NO: 5508 - protein, 7 aa, synthetic construct
  REGION 1..7: note = Amino acid sequence
SGHSTYA

SEQ ID NO: 5509 - protein, 7 aa, synthetic construct
  REGION 1..7: note = Amino acid sequence
QSVSSSY

SEQ ID NO: 5510 - protein, 9 aa, synthetic construct
  REGION 1..9: note = Amino acid sequence
SSNLGAGYA

SEQ ID NO: 5511 - protein, 9 aa, synthetic construct
  REGION 1..9: note = Amino acid sequence
STNIGTIYD

SEQ ID NO: 5512 - protein, 11 aa, synthetic construct
  REGION 1..11: note = Amino acid sequence
QSLLSSNGHHL

SEQ ID NO: 5513 - protein, 6 aa, synthetic construct
  REGION 1..6: note = Amino acid sequence
QGISSY

SEQ ID NO: 5514 - protein, 8 aa, synthetic construct
  REGION 1..8: note = Amino acid sequence
NSNIGSTF

SEQ ID NO: 5515 - protein, 11 aa, synthetic construct
  REGION 1..11: note = Amino acid sequence
QSLLHSNGVYY

SEQ ID NO: 5516 - protein, 6 aa, synthetic construct
  REGION 1..6: note = Amino acid sequence
SLRSYF

SEQ ID NO: 5517 - protein, 6 aa, synthetic construct
  REGION 1..6: note = Amino acid sequence
QSISSW

SEQ ID NO: 5518 - protein, 12 aa, synthetic construct
  REGION 1..12: note = Amino acid sequence
QTVLYDSNNKNY

SEQ ID NO: 5519 - protein, 8 aa, synthetic construct
  REGION 1..8: note = Amino acid sequence
SSNIGGKY

SEQ ID NO: 5520 - protein, 6 aa, synthetic construct
  REGION 1..6: note = Amino acid sequence
QSISDW

SEQ ID NO: 5521 - protein, 6 aa, synthetic construct
  REGION 1..6: note = Amino acid sequence
NPGIKS

SEQ ID NO: 5522 - protein, 9 aa, synthetic construct
  REGION 1..9: note = Amino acid sequence
TSNIGADYD

SEQ ID NO: 5523 - protein, 6 aa, synthetic construct
  REGION 1..6: note = Amino acid sequence
SLRSFY

SEQ ID NO: 5524 - protein, 9 aa, synthetic construct
  REGION 1..9: note = Amino acid sequence
SSDVDGYNY

SEQ ID NO: 5525 - protein, 12 aa, synthetic construct
  REGION 1..12: note = Amino acid sequence
QSVLYSSDNKNY

SEQ ID NO: 5526 - protein, 9 aa, synthetic construct
  REGION 1..9: note = Amino acid sequence
SSDVGGYNY

SEQ ID NO: 5527 - protein, 6 aa, synthetic construct
  REGION 1..6: note = Amino acid sequence
QDISNY

SEQ ID NO: 5528 - protein, 6 aa, synthetic construct
  REGION 1..6: note = Amino acid sequence
NIGSKS

SEQ ID NO: 5529 - protein, 7 aa, synthetic construct
  REGION 1..7: note = Amino acid sequence
QSVRGNY

SEQ ID NO: 5530 - protein, 8 aa, synthetic construct
  REGION 1..8: note = Amino acid sequence
SSNIGSNY

SEQ ID NO: 5531 - protein, 6 aa, synthetic construct
  REGION 1..6: note = Amino acid sequence
NIGSYN

SEQ ID NO: 5532 - protein, 7 aa, synthetic construct
  REGION 1..7: note = Amino acid sequence
QRVSSNY

SEQ ID NO: 5533 - protein, 9 aa, synthetic construct
  REGION 1..9: note = Amino acid sequence
SSDVGSYNL

SEQ ID NO: 5534 - protein, 11 aa, synthetic construct
  REGION 1..11: note = Amino acid sequence
QSLVYSDGNTY

SEQ ID NO: 5535 - protein, 8 aa, synthetic construct
  REGION 1..8: note = Amino acid sequence
SSNIGSNY

SEQ ID NO: 5536 - protein, 6 aa, synthetic construct
  REGION 1..6: note = Amino acid sequence
SLRSYY

SEQ ID NO: 5537 - protein, 6 aa, synthetic construct
  REGION 1..6: note = Amino acid sequence
QSISSY

SEQ ID NO: 5538 - protein, 6 aa, synthetic construct
  REGION 1..6: note = Amino acid sequence
NIGYRN

SEQ ID NO: 5539 - protein, 6 aa, synthetic construct
  REGION 1..6: note = Amino acid sequence
QGIRND

SEQ ID NO: 5540 - protein, 6 aa, synthetic construct
  REGION 1..6: note = Amino acid sequence
QSISSW

SEQ ID NO: 5541 - protein, 11 aa, synthetic construct
  REGION 1..11: note = Amino acid sequence
QSLLHSNGFNY

SEQ ID NO: 5542 - protein, 6 aa, synthetic construct
  REGION 1..6: note = Amino acid sequence
KLGDKY

SEQ ID NO: 5543 - protein, 6 aa, synthetic construct
  REGION 1..6: note = Amino acid sequence
ALPKKY

SEQ ID NO: 5544 - protein, 6 aa, synthetic construct
  REGION 1..6: note = Amino acid sequence
SLRSYY

SEQ ID NO: 5545 - protein, 12 aa, synthetic construct
  REGION 1..12: note = Amino acid sequence
QSVLYSSSSKNY

SEQ ID NO: 5546 - protein, 11 aa, synthetic construct
  REGION 1..11: note = Amino acid sequence
QSLLHSNGYNY

SEQ ID NO: 5547 - protein, 9 aa, synthetic construct
  REGION 1..9: note = Amino acid sequence
SSDVGGYNY

SEQ ID NO: 5548 - protein, 12 aa, synthetic construct
  REGION 1..12: note = Amino acid sequence
QSVLYSSNNKNY

SEQ ID NO: 5549 - protein, 9 aa, synthetic construct
  REGION 1..9: note = Amino acid sequence
SSDVGSYNL

SEQ ID NO: 5550 - protein, 6 aa, synthetic construct
  REGION 1..6: note = Amino acid sequence
ALPKKY

SEQ ID NO: 5551 - protein, 6 aa, synthetic construct
  REGION 1..6: note = Amino acid sequence
QSVSSN

SEQ ID NO: 5552 - protein, 7 aa, synthetic construct
  REGION 1..7: note = Amino acid sequence
QSVSSSY

SEQ ID NO: 5553 - protein, 6 aa, synthetic construct
  REGION 1..6: note = Amino acid sequence
NIGSRS

SEQ ID NO: 5554 - protein, 9 aa, synthetic construct
  REGION 1..9: note = Amino acid sequence
SSDIGTYNL

SEQ ID NO: 5555 - protein, 12 aa, synthetic construct
  REGION 1..12: note = Amino acid sequence
QSVLSTSNNKNY

SEQ ID NO: 5556 - protein, 6 aa, synthetic construct
  REGION 1..6: note = Amino acid sequence
NIGSKS

SEQ ID NO: 5557 - protein, 6 aa, synthetic construct
  REGION 1..6: note = Amino acid sequence
QHIAGR

SEQ ID NO: 5558 - protein, 8 aa, synthetic construct
  REGION 1..8: note = Amino acid sequence
SSNIGSNT

SEQ ID NO: 5559 - protein, 8 aa, synthetic construct
  REGION 1..8: note = Amino acid sequence
SGSIASNY

SEQ ID NO: 5560 - protein, 9 aa, synthetic construct
  REGION 1..9: note = Amino acid sequence
SSNIGAHYD

SEQ ID NO: 5561 - protein, 6 aa, synthetic construct
  REGION 1..6: note = Amino acid sequence
QSISSY

SEQ ID NO: 5562 - protein, 6 aa, synthetic construct
  REGION 1..6: note = Amino acid sequence
QDISNY

SEQ ID NO: 5563 - protein, 7 aa, synthetic construct
  REGION 1..7: note = Amino acid sequence
QDVASTY

SEQ ID NO: 5564 - protein, 9 aa, synthetic construct
  REGION 1..9: note = Amino acid sequence
TSDVGTYNL

SEQ ID NO: 5565 - protein, 7 aa, synthetic construct
  REGION 1..7: note = Amino acid sequence
QSVANNY

SEQ ID NO: 5566 - protein, 7 aa, synthetic construct
  REGION 1..7: note = Amino acid sequence
QSVSSNY

SEQ ID NO: 5567 - protein, 9 aa, synthetic construct
  REGION 1..9: note = Amino acid sequence
SGSVSTSFY

SEQ ID NO: 5568 - protein, 9 aa, synthetic construct
  REGION 1..9: note = Amino acid sequence
SSNIGAQYD

SEQ ID NO: 5569 - protein, 9 aa, synthetic construct
  REGION 1..9: note = Amino acid sequence
SSNIGAGYD

SEQ ID NO: 5570 - protein, 7 aa, synthetic construct
  REGION 1..7: note = Amino acid sequence
QSVSSSY

SEQ ID NO: 5571 - protein, 9 aa, synthetic construct
  REGION 1..9: note = Amino acid sequence
SSDVGGYNY

SEQ ID NO: 5572 - protein, 9 aa, synthetic construct
  REGION 1..9: note = Amino acid sequence
SSDIGGYDL

SEQ ID NO: 5573 - protein, 12 aa, synthetic construct
  REGION 1..12: note = Amino acid sequence
QSVLYSSNNKNY

SEQ ID NO: 5574 - protein, 8 aa, synthetic construct
  REGION 1..8: note = Amino acid sequence
SSNIGSNT

SEQ ID NO: 5575 - protein, 9 aa, synthetic construct
  REGION 1..9: note = Amino acid sequence
TGVVTTGHY

SEQ ID NO: 5576 - protein, 9 aa, synthetic construct
  REGION 1..9: note = Amino acid sequence
YSNIGAGYD

SEQ ID NO: 5577 - protein, 6 aa, synthetic construct
  REGION 1..6: note = Amino acid sequence
QNINRF

SEQ ID NO: 5578 - protein, 6 aa, synthetic construct
  REGION 1..6: note = Amino acid sequence
QGIRND

SEQ ID NO: 5579 - protein, 6 aa, synthetic construct
  REGION 1..6: note = Amino acid sequence
SLRTDY

SEQ ID NO: 5580 - protein, 12 aa, synthetic construct
  REGION 1..12: note = Amino acid sequence
QSVLSSYNNKDY

SEQ ID NO: 5581 - protein, 11 aa, synthetic construct
  REGION 1..11: note = Amino acid sequence
QSLVYSDGNTY

SEQ ID NO: 5582 - protein, 6 aa, synthetic construct
  REGION 1..6: note = Amino acid sequence
ALPKKY

SEQ ID NO: 5583 - protein, 6 aa, synthetic construct
  REGION 1..6: note = Amino acid sequence
NIGSKS

SEQ ID NO: 5584 - protein, 6 aa, synthetic construct
  REGION 1..6: note = Amino acid sequence
QSISTY

SEQ ID NO: 5585 - protein, 6 aa, synthetic construct
  REGION 1..6: note = Amino acid sequence
QSVGSD

SEQ ID NO: 5586 - protein, 12 aa, synthetic construct
  REGION 1..12: note = Amino acid sequence
QSVLYSSNNKNY

SEQ ID NO: 5587 - protein, 6 aa, synthetic construct
  REGION 1..6: note = Amino acid sequence
ALAKEY

SEQ ID NO: 5588 - protein, 6 aa, synthetic construct
  REGION 1..6: note = Amino acid sequence
QNIRDF

SEQ ID NO: 5589 - protein, 12 aa, synthetic construct
  REGION 1..12: note = Amino acid sequence
QTILYSSNNKNY

SEQ ID NO: 5590 - protein, 6 aa, synthetic construct
  REGION 1..6: note = Amino acid sequence
KLGNKY

SEQ ID NO: 5591 - protein, 8 aa, synthetic construct
  REGION 1..8: note = Amino acid sequence
RSNIGSNF

SEQ ID NO: 5592 - protein, 8 aa, synthetic construct
  REGION 1..8: note = Amino acid sequence
SSNIGNNY

SEQ ID NO: 5593 - protein, 6 aa, synthetic construct
  REGION 1..6: note = Amino acid sequence
QSVSFW

SEQ ID NO: 5594 - protein, 12 aa, synthetic construct
  REGION 1..12: note = Amino acid sequence
QSVFYSSNNKNY

SEQ ID NO: 5595 - protein, 12 aa, synthetic construct
  REGION 1..12: note = Amino acid sequence
QSVLYSSNNKNY

SEQ ID NO: 5596 - protein, 9 aa, synthetic construct
  REGION 1..9: note = Amino acid sequence
SNDIGRYKY

SEQ ID NO: 5597 - protein, 11 aa, synthetic construct
  REGION 1..11: note = Amino acid sequence
QSLVYSDGNTY

SEQ ID NO: 5598 - protein, 6 aa, synthetic construct
  REGION 1..6: note = Amino acid sequence
KLGDKY

SEQ ID NO: 5599 - protein, 7 aa, synthetic construct
  REGION 1..7: note = Amino acid sequence
QRVNSNY

SEQ ID NO: 5600 - protein, 6 aa, synthetic construct
  REGION 1..6: note = Amino acid sequence
NLGNKY

SEQ ID NO: 5601 - protein, 11 aa, synthetic construct
  REGION 1..11: note = Amino acid sequence
QSLLHSNGYNY

SEQ ID NO: 5602 - protein, 8 aa, synthetic construct
  REGION 1..8: note = Amino acid sequence
SSNIGNNY

SEQ ID NO: 5603 - protein, 6 aa, synthetic construct
  REGION 1..6: note = Amino acid sequence
QSISSW

SEQ ID NO: 5604 - protein, 6 aa, synthetic construct
  REGION 1..6: note = Amino acid sequence
QSISSW

SEQ ID NO: 5605 - protein, 9 aa, synthetic construct
  REGION 1..9: note = Amino acid sequence
SSNIGAGYD

SEQ ID NO: 5606 - protein, 6 aa, synthetic construct
  REGION 1..6: note = Amino acid sequence
ALPKQY

SEQ ID NO: 5607 - protein, 6 aa, synthetic construct
  REGION 1..6: note = Amino acid sequence
QNIRNN

SEQ ID NO: 5608 - protein, 6 aa, synthetic construct
  REGION 1..6: note = Amino acid sequence
QSVSSN

SEQ ID NO: 5609 - protein, 6 aa, synthetic construct
  REGION 1..6: note = Amino acid sequence
QSISSY

SEQ ID NO: 5610 - protein, 6 aa, synthetic construct
  REGION 1..6: note = Amino acid sequence
QSISTY

SEQ ID NO: 5611 - protein, 7 aa, synthetic construct
  REGION 1..7: note = Amino acid sequence
QSVTSSY

SEQ ID NO: 5612 - protein, 6 aa, synthetic construct
  REGION 1..6: note = Amino acid sequence
NIGSKS

SEQ ID NO: 5613 - protein, 8 aa, synthetic construct
  REGION 1..8: note = Amino acid sequence
SGSIADKY

SEQ ID NO: 5614 - protein, 11 aa, synthetic construct
  REGION 1..11: note = Amino acid sequence
QSLLHSNGYNY

SEQ ID NO: 5615 - protein, 6 aa, synthetic construct
  REGION 1..6: note = Amino acid sequence
QSISSW

SEQ ID NO: 5616 - protein, 11 aa, synthetic construct
  REGION 1..11: note = Amino acid sequence
QSLLYRDGEHY

SEQ ID NO: 5617 - protein, 6 aa, synthetic construct
  REGION 1..6: note = Amino acid sequence
QSISSY

SEQ ID NO: 5618 - protein, 12 aa, synthetic construct
  REGION 1..12: note = Amino acid sequence
QSLLYSSNYKNY

SEQ ID NO: 5619 - protein, 8 aa, synthetic construct
  REGION 1..8: note = Amino acid sequence
SSNIGSNY

SEQ ID NO: 5620 - protein, 9 aa, synthetic construct
  REGION 1..9: note = Amino acid sequence
SSDVGGYNY

SEQ ID NO: 5621 - protein, 9 aa, synthetic construct
  REGION 1..9: note = Amino acid sequence
NSNIGAGYD

SEQ ID NO: 5622 - protein, 9 aa, synthetic construct
  REGION 1..9: note = Amino acid sequence
SDINVTNYN

SEQ ID NO: 5623 - protein, 11 aa, synthetic construct
  REGION 1..11: note = Amino acid sequence
QSLLHSDGYNY

SEQ ID NO: 5624 - protein, 6 aa, synthetic construct
  REGION 1..6: note = Amino acid sequence
QGIRND

SEQ ID NO: 5625 - protein, 11 aa, synthetic construct
  REGION 1..11: note = Amino acid sequence
QSLLHSDGKTY

SEQ ID NO: 5626 - protein, 8 aa, synthetic construct
  REGION 1..8: note = Amino acid sequence
MSGGGGSI

SEQ ID NO: 5627 - protein, 8 aa, synthetic construct
  REGION 1..8: note = Amino acid sequence
IKQDGSEK

SEQ ID NO: 5628 - protein, 8 aa, synthetic construct
  REGION 1..8: note = Amino acid sequence
ISWNSGNI

SEQ ID NO: 5629 - protein, 7 aa, synthetic construct
  REGION 1..7: note = Amino acid sequence
IYWDDDK

SEQ ID NO: 5630 - protein, 8 aa, synthetic construct
  REGION 1..8: note = Amino acid sequence
INTSGGST

SEQ ID NO: 5631 - protein, 8 aa, synthetic construct
  REGION 1..8: note = Amino acid sequence
ISWNSVSI

SEQ ID NO: 5632 - protein, 8 aa, synthetic construct
  REGION 1..8: note = Amino acid sequence
ITTYNRDT

SEQ ID NO: 5633 - protein, 8 aa, synthetic construct
  REGION 1..8: note = Amino acid sequence
ISGDGGGT

SEQ ID NO: 5634 - protein, 8 aa, synthetic construct
  REGION 1..8: note = Amino acid sequence
IRYDGRNK

SEQ ID NO: 5635 - protein, 8 aa, synthetic construct
  REGION 1..8: note = Amino acid sequence
IGWDSGGI

SEQ ID NO: 5636 - protein, 8 aa, synthetic construct
  REGION 1..8: note = Amino acid sequence
ISIYSGNT

SEQ ID NO: 5637 - protein, 8 aa, synthetic construct
  REGION 1..8: note = Amino acid sequence
ISSDGRKI

SEQ ID NO: 5638 - protein, 8 aa, synthetic construct
  REGION 1..8: note = Amino acid sequence
ISATTGST

SEQ ID NO: 5639 - protein, 9 aa, synthetic construct
  REGION 1..9: note = Amino acid sequence
TYYRSKWYN

SEQ ID NO: 5640 - protein, 8 aa, synthetic construct
  REGION 1..8: note = Amino acid sequence
IHYDGRNK

SEQ ID NO: 5641 - protein, 8 aa, synthetic construct
  REGION 1..8: note = Amino acid sequence
ISSSSSSI

SEQ ID NO: 5642 - protein, 8 aa, synthetic construct
  REGION 1..8: note = Amino acid sequence
ISAYNGNT

SEQ ID NO: 5643 - protein, 8 aa, synthetic construct
  REGION 1..8: note = Amino acid sequence
IGIGGNTI

SEQ ID NO: 5644 - protein, 8 aa, synthetic construct
  REGION 1..8: note = Amino acid sequence
INAGNGNT

SEQ ID NO: 5645 - protein, 7 aa, synthetic construct
  REGION 1..7: note = Amino acid sequence
VYHSGNA

SEQ ID NO: 5646 - protein, 7 aa, synthetic construct
  REGION 1..7: note = Amino acid sequence
IYWDDDE

SEQ ID NO: 5647 - protein, 8 aa, synthetic construct
  REGION 1..8: note = Amino acid sequence
ISWGSSYI

SEQ ID NO: 5648 - protein, 8 aa, synthetic construct
  REGION 1..8: note = Amino acid sequence
ISSSSRYI

SEQ ID NO: 5649 - protein, 7 aa, synthetic construct
  REGION 1..7: note = Amino acid sequence
IYYSGNR

SEQ ID NO: 5650 - protein, 7 aa, synthetic construct
  REGION 1..7: note = Amino acid sequence
IYTSGNT

SEQ ID NO: 5651 - protein, 8 aa, synthetic construct
  REGION 1..8: note = Amino acid sequence
ISSKSSSK

SEQ ID NO: 5652 - protein, 7 aa, synthetic construct
  REGION 1..7: note = Amino acid sequence
IYYRGTT

SEQ ID NO: 5653 - protein, 7 aa, synthetic construct
  REGION 1..7: note = Amino acid sequence
IWYDGSN

SEQ ID NO: 5654 - protein, 7 aa, synthetic construct
  REGION 1..7: note = Amino acid sequence
MYTSGST

SEQ ID NO: 5655 - protein, 8 aa, synthetic construct
  REGION 1..8: note = Amino acid sequence
INPNSGGT

SEQ ID NO: 5656 - protein, 7 aa, synthetic construct
  REGION 1..7: note = Amino acid sequence
IHHTGSA

SEQ ID NO: 5657 - protein, 7 aa, synthetic construct
  REGION 1..7: note = Amino acid sequence
IYYSGDT

SEQ ID NO: 5658 - protein, 8 aa, synthetic construct
  REGION 1..8: note = Amino acid sequence
ISHDGSNK

SEQ ID NO: 5659 - protein, 7 aa, synthetic construct
  REGION 1..7: note = Amino acid sequence
IYWDDDK

SEQ ID NO: 5660 - protein, 8 aa, synthetic construct
  REGION 1..8: note = Amino acid sequence
INTTSDPI

SEQ ID NO: 5661 - protein, 8 aa, synthetic construct
  REGION 1..8: note = Amino acid sequence
IIPIFGTA

SEQ ID NO: 5662 - protein, 7 aa, synthetic construct
  REGION 1..7: note = Amino acid sequence
IYFSVTT

SEQ ID NO: 5663 - protein, 7 aa, synthetic construct
  REGION 1..7: note = Amino acid sequence
LSYSGNT

SEQ ID NO: 5664 - protein, 8 aa, synthetic construct
  REGION 1..8: note = Amino acid sequence
INAGNGDI

SEQ ID NO: 5665 - protein, 8 aa, synthetic construct
  REGION 1..8: note = Amino acid sequence
ISGSGHST

SEQ ID NO: 5666 - protein, 8 aa, synthetic construct
  REGION 1..8: note = Amino acid sequence
INWNGGST

SEQ ID NO: 5667 - protein, 8 aa, synthetic construct
  REGION 1..8: note = Amino acid sequence
ISYDGSNK

SEQ ID NO: 5668 - protein, 7 aa, synthetic construct
  REGION 1..7: note = Amino acid sequence
IYYSGST

SEQ ID NO: 5669 - protein, 8 aa, synthetic construct
  REGION 1..8: note = Amino acid sequence
INPNSGGT

SEQ ID NO: 5670 - protein, 7 aa, synthetic construct
  REGION 1..7: note = Amino acid sequence
IGTAGDT

SEQ ID NO: 5671 - protein, 8 aa, synthetic construct
  REGION 1..8: note = Amino acid sequence
ISYDGSNS

SEQ ID NO: 5672 - protein, 8 aa, synthetic construct
  REGION 1..8: note = Amino acid sequence
MSSGGNRR

SEQ ID NO: 5673 - protein, 8 aa, synthetic construct
  REGION 1..8: note = Amino acid sequence
ISSSGTYI

SEQ ID NO: 5674 - protein, 8 aa, synthetic construct
  REGION 1..8: note = Amino acid sequence
ISYDGSNK

SEQ ID NO: 5675 - protein, 8 aa, synthetic construct
  REGION 1..8: note = Amino acid sequence
ISWNSGSI

SEQ ID NO: 5676 - protein, 7 aa, synthetic construct
  REGION 1..7: note = Amino acid sequence
IYYSGST

SEQ ID NO: 5677 - protein, 8 aa, synthetic construct
  REGION 1..8: note = Amino acid sequence
IIPIFGTA

SEQ ID NO: 5678 - protein, 8 aa, synthetic construct
  REGION 1..8: note = Amino acid sequence
INGYNGNT

SEQ ID NO: 5679 - protein, 8 aa, synthetic construct
  REGION 1..8: note = Amino acid sequence
ITSSGDTI

SEQ ID NO: 5680 - protein, 8 aa, synthetic construct
  REGION 1..8: note = Amino acid sequence
IIPIFGTT

SEQ ID NO: 5681 - protein, 8 aa, synthetic construct
  REGION 1..8: note = Amino acid sequence
IYPGDSDT

SEQ ID NO: 5682 - protein, 8 aa, synthetic construct
  REGION 1..8: note = Amino acid sequence
TWYEGTNE

SEQ ID NO: 5683 - protein, 8 aa, synthetic construct
  REGION 1..8: note = Amino acid sequence
MSGSGAGT

SEQ ID NO: 5684 - protein, 8 aa, synthetic construct
  REGION 1..8: note = Amino acid sequence
ISYDGGTK

SEQ ID NO: 5685 - protein, 8 aa, synthetic construct
  REGION 1..8: note = Amino acid sequence
IWYDGSTK

SEQ ID NO: 5686 - protein, 7 aa, synthetic construct
  REGION 1..7: note = Amino acid sequence
IYFTGST

SEQ ID NO: 5687 - protein, 8 aa, synthetic construct
  REGION 1..8: note = Amino acid sequence
IYPGDSDT

SEQ ID NO: 5688 - protein, 7 aa, synthetic construct
  REGION 1..7: note = Amino acid sequence
IYTSGST

SEQ ID NO: 5689 - protein, 9 aa, synthetic construct
  REGION 1..9: note = Amino acid sequence
THYRSKWYN

SEQ ID NO: 5690 - protein, 8 aa, synthetic construct
  REGION 1..8: note = Amino acid sequence
FDPEDGET

SEQ ID NO: 5691 - protein, 8 aa, synthetic construct
  REGION 1..8: note = Amino acid sequence
ISSSSSYI

SEQ ID NO: 5692 - protein, 8 aa, synthetic construct
  REGION 1..8: note = Amino acid sequence
ISGSGGST

SEQ ID NO: 5693 - protein, 8 aa, synthetic construct
  REGION 1..8: note = Amino acid sequence
ITPIFNIT

SEQ ID NO: 5694 - protein, 7 aa, synthetic construct
  REGION 1..7: note = Amino acid sequence
IYYSGST

SEQ ID NO: 5695 - protein, 8 aa, synthetic construct
  REGION 1..8: note = Amino acid sequence
ITYDGQIK

SEQ ID NO: 5696 - protein, 7 aa, synthetic construct
  REGION 1..7: note = Amino acid sequence
IYYSGTT

SEQ ID NO: 5697 - protein, 8 aa, synthetic construct
  REGION 1..8: note = Amino acid sequence
ISWNSGSI

SEQ ID NO: 5698 - protein, 7 aa, synthetic construct
  REGION 1..7: note = Amino acid sequence
IYSSGDT

SEQ ID NO: 5699 - protein, 7 aa, synthetic construct
  REGION 1..7: note = Amino acid sequence
IYWDDDE

SEQ ID NO: 5700 - protein, 8 aa, synthetic construct
  REGION 1..8: note = Amino acid sequence
VSSSGSTM

SEQ ID NO: 5701 - protein, 8 aa, synthetic construct
  REGION 1..8: note = Amino acid sequence
IDPSDSYT

SEQ ID NO: 5702 - protein, 8 aa, synthetic construct
  REGION 1..8: note = Amino acid sequence
IFPADSDT

SEQ ID NO: 5703 - protein, 7 aa, synthetic construct
  REGION 1..7: note = Amino acid sequence
IFYSGIT

SEQ ID NO: 5704 - protein, 8 aa, synthetic construct
  REGION 1..8: note = Amino acid sequence
IIPIFGTS

SEQ ID NO: 5705 - protein, 8 aa, synthetic construct
  REGION 1..8: note = Amino acid sequence
ITWDGSII

SEQ ID NO: 5706 - protein, 8 aa, synthetic construct
  REGION 1..8: note = Amino acid sequence
INAYQGVT

SEQ ID NO: 5707 - protein, 8 aa, synthetic construct
  REGION 1..8: note = Amino acid sequence
IKEDGSEK

SEQ ID NO: 5708 - protein, 7 aa, synthetic construct
  REGION 1..7: note = Amino acid sequence
ISYNGNT

SEQ ID NO: 5709 - protein, 6 aa, synthetic construct
  REGION 1..6: note = Amino acid sequence
IGSSGT

SEQ ID NO: 5710 - protein, 8 aa, synthetic construct
  REGION 1..8: note = Amino acid sequence
ISGLGNSI

SEQ ID NO: 5711 - protein, 8 aa, synthetic construct
  REGION 1..8: note = Amino acid sequence
ISDDGNDK

SEQ ID NO: 5712 - protein, 8 aa, synthetic construct
  REGION 1..8: note = Amino acid sequence
ISWDGGST

SEQ ID NO: 5713 - protein, 8 aa, synthetic construct
  REGION 1..8: note = Amino acid sequence
INTNNGKT

SEQ ID NO: 5714 - protein, 8 aa, synthetic construct
  REGION 1..8: note = Amino acid sequence
IDWSGKTT

SEQ ID NO: 5715 - protein, 8 aa, synthetic construct
  REGION 1..8: note = Amino acid sequence
ISGSGGST

SEQ ID NO: 5716 - protein, 8 aa, synthetic construct
  REGION 1..8: note = Amino acid sequence
VSYDGTNK

SEQ ID NO: 5717 - protein, 8 aa, synthetic construct
  REGION 1..8: note = Amino acid sequence
ITSTSSYL

SEQ ID NO: 5718 - protein, 7 aa, synthetic construct
  REGION 1..7: note = Amino acid sequence
IYTSGST

SEQ ID NO: 5719 - protein, 7 aa, synthetic construct
  REGION 1..7: note = Amino acid sequence
VYYSGRT

SEQ ID NO: 5720 - protein, 8 aa, synthetic construct
  REGION 1..8: note = Amino acid sequence
VSYDGTNK

SEQ ID NO: 5721 - protein, 8 aa, synthetic construct
  REGION 1..8: note = Amino acid sequence
IYPVDSDT

SEQ ID NO: 5722 - protein, 8 aa, synthetic construct
  REGION 1..8: note = Amino acid sequence
TGGSGYTK

SEQ ID NO: 5723 - protein, 8 aa, synthetic construct
  REGION 1..8: note = Amino acid sequence
ISSSGSTI

SEQ ID NO: 5724 - protein, 8 aa, synthetic construct
  REGION 1..8: note = Amino acid sequence
IKEDGSEK

SEQ ID NO: 5725 - protein, 7 aa, synthetic construct
  REGION 1..7: note = Amino acid sequence
IYYSGST

SEQ ID NO: 5726 - protein, 8 aa, synthetic construct
  REGION 1..8: note = Amino acid sequence
ISYDGSNK

SEQ ID NO: 5727 - protein, 8 aa, synthetic construct
  REGION 1..8: note = Amino acid sequence
IGSSTTAI

SEQ ID NO: 5728 - protein, 7 aa, synthetic construct
  REGION 1..7: note = Amino acid sequence
ISYSGST

SEQ ID NO: 5729 - protein, 7 aa, synthetic construct
  REGION 1..7: note = Amino acid sequence
IYYSGST

SEQ ID NO: 5730 - protein, 7 aa, synthetic construct
  REGION 1..7: note = Amino acid sequence
ISYSGST

SEQ ID NO: 5731 - protein, 8 aa, synthetic construct
  REGION 1..8: note = Amino acid sequence
IKQDGSEK

SEQ ID NO: 5732 - protein, 8 aa, synthetic construct
  REGION 1..8: note = Amino acid sequence
ISWNSGSI

SEQ ID NO: 5733 - protein, 8 aa, synthetic construct
  REGION 1..8: note = Amino acid sequence
IYPGDSDT

SEQ ID NO: 5734 - protein, 9 aa, synthetic construct
  REGION 1..9: note = Amino acid sequence
TYYRSQWMN

SEQ ID NO: 5735 - protein, 9 aa, synthetic construct
  REGION 1..9: note = Amino acid sequence
TYYRSKWYN

SEQ ID NO: 5736 - protein, 7 aa, synthetic construct
  REGION 1..7: note = Amino acid sequence
LFYSGST

SEQ ID NO: 5737 - protein, 8 aa, synthetic construct
  REGION 1..8: note = Amino acid sequence
IYPGDSDT

SEQ ID NO: 5738 - protein, 8 aa, synthetic construct
  REGION 1..8: note = Amino acid sequence
IWYDGSNK

SEQ ID NO: 5739 - protein, 8 aa, synthetic construct
  REGION 1..8: note = Amino acid sequence
ISSSSRYV

SEQ ID NO: 5740 - protein, 8 aa, synthetic construct
  REGION 1..8: note = Amino acid sequence
IIPILNIT

SEQ ID NO: 5741 - protein, 8 aa, synthetic construct
  REGION 1..8: note = Amino acid sequence
ISSTSNYI

SEQ ID NO: 5742 - protein, 8 aa, synthetic construct
  REGION 1..8: note = Amino acid sequence
ISYDGSDE

SEQ ID NO: 5743 - protein, 8 aa, synthetic construct
  REGION 1..8: note = Amino acid sequence
IWHDGSHK

SEQ ID NO: 5744 - protein, 8 aa, synthetic construct
  REGION 1..8: note = Amino acid sequence
ISGDGRST

SEQ ID NO: 5745 - protein, 8 aa, synthetic construct
  REGION 1..8: note = Amino acid sequence
ISDDGKNK

SEQ ID NO: 5746 - protein, 8 aa, synthetic construct
  REGION 1..8: note = Amino acid sequence
IKQDGSEK

SEQ ID NO: 5747 - protein, 8 aa, synthetic construct
  REGION 1..8: note = Amino acid sequence
ISSDGSTT

SEQ ID NO: 5748 - protein, 10 aa, synthetic construct
  REGION 1..10: note = Amino acid sequence
IRSKTDGGTT

SEQ ID NO: 5749 - protein, 7 aa, synthetic construct
  REGION 1..7: note = Amino acid sequence
ISDIGDT

SEQ ID NO: 5750 - protein, 8 aa, synthetic construct
  REGION 1..8: note = Amino acid sequence
IIPIFGTA

SEQ ID NO: 5751 - protein, 7 aa, synthetic construct
  REGION 1..7: note = Amino acid sequence
IYFSGKT

SEQ ID NO: 5752 - protein, 8 aa, synthetic construct
  REGION 1..8: note = Amino acid sequence
INRDGSYT

SEQ ID NO: 5753 - protein, 7 aa, synthetic construct
  REGION 1..7: note = Amino acid sequence
VYYSGST

SEQ ID NO: 5754 - protein, 7 aa, synthetic construct
  REGION 1..7: note = Amino acid sequence
VSPSGTN

SEQ ID NO: 5755 - protein, 8 aa, synthetic construct
  REGION 1..8: note = Amino acid sequence
IIPIVGEA

SEQ ID NO: 5756 - protein, 8 aa, synthetic construct
  REGION 1..8: note = Amino acid sequence
INSDGSST

SEQ ID NO: 5757 - protein, 7 aa, synthetic construct
  REGION 1..7: note = Amino acid sequence
IYYNGST

SEQ ID NO: 5758 - protein, 8 aa, synthetic construct
  REGION 1..8: note = Amino acid sequence
ISGSGGST

SEQ ID NO: 5759 - protein, 8 aa, synthetic construct
  REGION 1..8: note = Amino acid sequence
ISASGRTT

SEQ ID NO: 5760 - protein, 8 aa, synthetic construct
  REGION 1..8: note = Amino acid sequence
ITANGGST

SEQ ID NO: 5761 - protein, 7 aa, synthetic construct
  REGION 1..7: note = Amino acid sequence
IYHRGTS

SEQ ID NO: 5762 - protein, 8 aa, synthetic construct
  REGION 1..8: note = Amino acid sequence
ISFDGSNQ

SEQ ID NO: 5763 - protein, 8 aa, synthetic construct
  REGION 1..8: note = Amino acid sequence
IDPSGGSR

SEQ ID NO: 5764 - protein, 8 aa, synthetic construct
  REGION 1..8: note = Amino acid sequence
INTDGSST

SEQ ID NO: 5765 - protein, 8 aa, synthetic construct
  REGION 1..8: note = Amino acid sequence
FDPEGGET

SEQ ID NO: 5766 - protein, 7 aa, synthetic construct
  REGION 1..7: note = Amino acid sequence
IYYNGDT

SEQ ID NO: 5767 - protein, 8 aa, synthetic construct
  REGION 1..8: note = Amino acid sequence
ISAYTGNT

SEQ ID NO: 5768 - protein, 8 aa, synthetic construct
  REGION 1..8: note = Amino acid sequence
IIWNSGTT

SEQ ID NO: 5769 - protein, 8 aa, synthetic construct
  REGION 1..8: note = Amino acid sequence
INTDGSRG

SEQ ID NO: 5770 - protein, 7 aa, synthetic construct
  REGION 1..7: note = Amino acid sequence
IYHSGST

SEQ ID NO: 5771 - protein, 10 aa, synthetic construct
  REGION 1..10: note = Amino acid sequence
IKSKSDGGST

SEQ ID NO: 5772 - protein, 7 aa, synthetic construct
  REGION 1..7: note = Amino acid sequence
IYSGGTT

SEQ ID NO: 5773 - protein, 10 aa, synthetic construct
  REGION 1..10: note = Amino acid sequence
IKNRANSYNT

SEQ ID NO: 5774 - protein, 8 aa, synthetic construct
  REGION 1..8: note = Amino acid sequence
ISFDGSDK

SEQ ID NO: 5775 - protein, 8 aa, synthetic construct
  REGION 1..8: note = Amino acid sequence
ITAGGSFI

SEQ ID NO: 5776 - protein, 8 aa, synthetic construct
  REGION 1..8: note = Amino acid sequence
INPNSGGT

SEQ ID NO: 5777 - protein, 8 aa, synthetic construct
  REGION 1..8: note = Amino acid sequence
ISYSGGST

SEQ ID NO: 5778 - protein, 8 aa, synthetic construct
  REGION 1..8: note = Amino acid sequence
ISSSGGDI

SEQ ID NO: 5779 - protein, 8 aa, synthetic construct
  REGION 1..8: note = Amino acid sequence
ISWNSGDI

SEQ ID NO: 5780 - protein, 8 aa, synthetic construct
  REGION 1..8: note = Amino acid sequence
IGGSGGYT

SEQ ID NO: 5781 - protein, 7 aa, synthetic construct
  REGION 1..7: note = Amino acid sequence
IFHSGSA

SEQ ID NO: 5782 - protein, 8 aa, synthetic construct
  REGION 1..8: note = Amino acid sequence
MITTFGKA

SEQ ID NO: 5783 - protein, 7 aa, synthetic construct
  REGION 1..7: note = Amino acid sequence
IYYSGST

SEQ ID NO: 5784 - protein, 8 aa, synthetic construct
  REGION 1..8: note = Amino acid sequence
ISAYNGNT

SEQ ID NO: 5785 - protein, 8 aa, synthetic construct
  REGION 1..8: note = Amino acid sequence
INTVTGIP

SEQ ID NO: 5786 - protein, 7 aa, synthetic construct
  REGION 1..7: note = Amino acid sequence
VYYSGST

SEQ ID NO: 5787 - protein, 8 aa, synthetic construct
  REGION 1..8: note = Amino acid sequence
IAYDGSQK

SEQ ID NO: 5788 - protein, 8 aa, synthetic construct
  REGION 1..8: note = Amino acid sequence
IIPVFGTT

SEQ ID NO: 5789 - protein, 8 aa, synthetic construct
  REGION 1..8: note = Amino acid sequence
INAGNGDT

SEQ ID NO: 5790 - protein, 7 aa, synthetic construct
  REGION 1..7: note = Amino acid sequence
IYHSGST

SEQ ID NO: 5791 - protein, 8 aa, synthetic construct
  REGION 1..8: note = Amino acid sequence
VEGYRSEE

SEQ ID NO: 5792 - protein, 8 aa, synthetic construct
  REGION 1..8: note = Amino acid sequence
ISASGGGT

SEQ ID NO: 5793 - protein, 7 aa, synthetic construct
  REGION 1..7: note = Amino acid sequence
IYYSGTS

SEQ ID NO: 5794 - protein, 8 aa, synthetic construct
  REGION 1..8: note = Amino acid sequence
INPKTGDT

SEQ ID NO: 5795 - protein, 8 aa, synthetic construct
  REGION 1..8: note = Amino acid sequence
ISYDGSNK

SEQ ID NO: 5796 - protein, 8 aa, synthetic construct
  REGION 1..8: note = Amino acid sequence
ISSSSSYI

SEQ ID NO: 5797 - protein, 7 aa, synthetic construct
  REGION 1..7: note = Amino acid sequence
IYYSGST

SEQ ID NO: 5798 - protein, 10 aa, synthetic construct
  REGION 1..10: note = Amino acid sequence
IKSKTDGGTT

SEQ ID NO: 5799 - protein, 8 aa, synthetic construct
  REGION 1..8: note = Amino acid sequence
INPSFGST

SEQ ID NO: 5800 - protein, 8 aa, synthetic construct
  REGION 1..8: note = Amino acid sequence
IMPMFGRT

SEQ ID NO: 5801 - protein, 8 aa, synthetic construct
  REGION 1..8: note = Amino acid sequence
ISSTGTTT

SEQ ID NO: 5802 - protein, 8 aa, synthetic construct
  REGION 1..8: note = Amino acid sequence
ISNDGSNK

SEQ ID NO: 5803 - protein, 8 aa, synthetic construct
  REGION 1..8: note = Amino acid sequence
IYPGDSDT

SEQ ID NO: 5804 - protein, 8 aa, synthetic construct
  REGION 1..8: note = Amino acid sequence
ISRGSSVI

SEQ ID NO: 5805 - protein, 7 aa, synthetic construct
  REGION 1..7: note = Amino acid sequence
IFSNDEK

SEQ ID NO: 5806 - protein, 8 aa, synthetic construct
  REGION 1..8: note = Amino acid sequence
INPNSGGT

SEQ ID NO: 5807 - protein, 8 aa, synthetic construct
  REGION 1..8: note = Amino acid sequence
ISAYNGNT

SEQ ID NO: 5808 - protein, 9 aa, synthetic construct
  REGION 1..9: note = Amino acid sequence
TFYRTKWYS

SEQ ID NO: 5809 - protein, 7 aa, synthetic construct
  REGION 1..7: note = Amino acid sequence
ICHSGST

SEQ ID NO: 5810 - protein, 7 aa, synthetic construct
  REGION 1..7: note = Amino acid sequence
IYSGGST

SEQ ID NO: 5811 - protein, 8 aa, synthetic construct
  REGION 1..8: note = Amino acid sequence
INPNGGTT

SEQ ID NO: 5812 - protein, 7 aa, synthetic construct
  REGION 1..7: note = Amino acid sequence
IYYSGST

SEQ ID NO: 5813 - protein, 7 aa, synthetic construct
  REGION 1..7: note = Amino acid sequence
IHYTGST

SEQ ID NO: 5814 - protein, 8 aa, synthetic construct
  REGION 1..8: note = Amino acid sequence
ISYDGSNK

SEQ ID NO: 5815 - protein, 8 aa, synthetic construct
  REGION 1..8: note = Amino acid sequence
ISGSGGST

SEQ ID NO: 5816 - protein, 7 aa, synthetic construct
  REGION 1..7: note = Amino acid sequence
IYYSGST

SEQ ID NO: 5817 - protein, 8 aa, synthetic construct
  REGION 1..8: note = Amino acid sequence
INPNSGGT

SEQ ID NO: 5818 - protein, 8 aa, synthetic construct
  REGION 1..8: note = Amino acid sequence
INPADSDT

SEQ ID NO: 5819 - protein, 8 aa, synthetic construct
  REGION 1..8: note = Amino acid sequence
IYPADSDT

SEQ ID NO: 5820 - protein, 8 aa, synthetic construct
  REGION 1..8: note = Amino acid sequence
ISYSGNTT

SEQ ID NO: 5821 - protein, 8 aa, synthetic construct
  REGION 1..8: note = Amino acid sequence
INPGGGST

SEQ ID NO: 5822 - protein, 8 aa, synthetic construct
  REGION 1..8: note = Amino acid sequence
ITSPGGHT

SEQ ID NO: 5823 - protein, 8 aa, synthetic construct
  REGION 1..8: note = Amino acid sequence
ISGSGGST

SEQ ID NO: 5824 - protein, 8 aa, synthetic construct
  REGION 1..8: note = Amino acid sequence
INPVNGVT

SEQ ID NO: 5825 - protein, 8 aa, synthetic construct
  REGION 1..8: note = Amino acid sequence
INTNTGNP

SEQ ID NO: 5826 - protein, 8 aa, synthetic construct
  REGION 1..8: note = Amino acid sequence
ISSDGSNK

SEQ ID NO: 5827 - protein, 8 aa, synthetic construct
  REGION 1..8: note = Amino acid sequence
VSGSGFTT

SEQ ID NO: 5828 - protein, 8 aa, synthetic construct
  REGION 1..8: note = Amino acid sequence
ISSSSSYI

SEQ ID NO: 5829 - protein, 7 aa, synthetic construct
  REGION 1..7: note = Amino acid sequence
INWDDDK

SEQ ID NO: 5830 - protein, 7 aa, synthetic construct
  REGION 1..7: note = Amino acid sequence
IYWDDDT

SEQ ID NO: 5831 - protein, 7 aa, synthetic construct
  REGION 1..7: note = Amino acid sequence
IYYIGTT

SEQ ID NO: 5832 - protein, 8 aa, synthetic construct
  REGION 1..8: note = Amino acid sequence
INQDGGEK

SEQ ID NO: 5833 - protein, 8 aa, synthetic construct
  REGION 1..8: note = Amino acid sequence
IIPVFGPP

SEQ ID NO: 5834 - protein, 8 aa, synthetic construct
  REGION 1..8: note = Amino acid sequence
IVPIFDTT

SEQ ID NO: 5835 - protein, 8 aa, synthetic construct
  REGION 1..8: note = Amino acid sequence
INAGNGNT

SEQ ID NO: 5836 - protein, 8 aa, synthetic construct
  REGION 1..8: note = Amino acid sequence
ISPYNGNI

SEQ ID NO: 5837 - protein, 8 aa, synthetic construct
  REGION 1..8: note = Amino acid sequence
ISGPGESS

SEQ ID NO: 5838 - protein, 8 aa, synthetic construct
  REGION 1..8: note = Amino acid sequence
INPSGGYT

SEQ ID NO: 5839 - protein, 8 aa, synthetic construct
  REGION 1..8: note = Amino acid sequence
VFPGDSDI

SEQ ID NO: 5840 - protein, 8 aa, synthetic construct
  REGION 1..8: note = Amino acid sequence
IWYDGTNK

SEQ ID NO: 5841 - protein, 8 aa, synthetic construct
  REGION 1..8: note = Amino acid sequence
IDPSDSYT

SEQ ID NO: 5842 - protein, 8 aa, synthetic construct
  REGION 1..8: note = Amino acid sequence
ISGDGTRT

SEQ ID NO: 5843 - protein, 8 aa, synthetic construct
  REGION 1..8: note = Amino acid sequence
TYHRTTTT

SEQ ID NO: 5844 - protein, 8 aa, synthetic construct
  REGION 1..8: note = Amino acid sequence
ITPNSGTP

SEQ ID NO: 5845 - protein, 10 aa, synthetic construct
  REGION 1..10: note = Amino acid sequence
IRSKAYGGTR

SEQ ID NO: 5846 - protein, 8 aa, synthetic construct
  REGION 1..8: note = Amino acid sequence
ISGYNGRT

SEQ ID NO: 5847 - protein, 8 aa, synthetic construct
  REGION 1..8: note = Amino acid sequence
MNADGSEK

SEQ ID NO: 5848 - protein, 8 aa, synthetic construct
  REGION 1..8: note = Amino acid sequence
ISSSSSTI

SEQ ID NO: 5849 - protein, 7 aa, synthetic construct
  REGION 1..7: note = Amino acid sequence
IYYSGST

SEQ ID NO: 5850 - protein, 7 aa, synthetic construct
  REGION 1..7: note = Amino acid sequence
MFYGGST

SEQ ID NO: 5851 - protein, 8 aa, synthetic construct
  REGION 1..8: note = Amino acid sequence
IWYDGSNE

SEQ ID NO: 5852 - protein, 8 aa, synthetic construct
  REGION 1..8: note = Amino acid sequence
ISTDSGNT

SEQ ID NO: 5853 - protein, 8 aa, synthetic construct
  REGION 1..8: note = Amino acid sequence
IHWNGGST

SEQ ID NO: 5854 - protein, 8 aa, synthetic construct
  REGION 1..8: note = Amino acid sequence
MWYDGNNK

SEQ ID NO: 5855 - protein, 8 aa, synthetic construct
  REGION 1..8: note = Amino acid sequence
ISGSGGRT

SEQ ID NO: 5856 - protein, 10 aa, synthetic construct
  REGION 1..10: note = Amino acid sequence
IKTKTDGGTT

SEQ ID NO: 5857 - protein, 8 aa, synthetic construct
  REGION 1..8: note = Amino acid sequence
IWHDGSKT

SEQ ID NO: 5858 - protein, 8 aa, synthetic construct
  REGION 1..8: note = Amino acid sequence
ISPYTRQT

SEQ ID NO: 5859 - protein, 8 aa, synthetic construct
  REGION 1..8: note = Amino acid sequence
TRFDGSEK

SEQ ID NO: 5860 - protein, 8 aa, synthetic construct
  REGION 1..8: note = Amino acid sequence
ISHDGSNN

SEQ ID NO: 5861 - protein, 8 aa, synthetic construct
  REGION 1..8: note = Amino acid sequence
IHVGNDHT

SEQ ID NO: 5862 - protein, 8 aa, synthetic construct
  REGION 1..8: note = Amino acid sequence
FDPSDSYN

SEQ ID NO: 5863 - protein, 7 aa, synthetic construct
  REGION 1..7: note = Amino acid sequence
IYWDDDK

SEQ ID NO: 5864 - protein, 8 aa, synthetic construct
  REGION 1..8: note = Amino acid sequence
ISGDSRDI

SEQ ID NO: 5865 - protein, 8 aa, synthetic construct
  REGION 1..8: note = Amino acid sequence
IIPVLGIP

SEQ ID NO: 5866 - protein, 7 aa, synthetic construct
  REGION 1..7: note = Amino acid sequence
VYYSGNT

SEQ ID NO: 5867 - protein, 8 aa, synthetic construct
  REGION 1..8: note = Amino acid sequence
ISSNGGST

SEQ ID NO: 5868 - protein, 8 aa, synthetic construct
  REGION 1..8: note = Amino acid sequence
ISSSRSTI

SEQ ID NO: 5869 - protein, 7 aa, synthetic construct
  REGION 1..7: note = Amino acid sequence
IIHTGTT

SEQ ID NO: 5870 - protein, 8 aa, synthetic construct
  REGION 1..8: note = Amino acid sequence
INTDGTVT

SEQ ID NO: 5871 - protein, 7 aa, synthetic construct
  REGION 1..7: note = Amino acid sequence
IYWDDDK

SEQ ID NO: 5872 - protein, 8 aa, synthetic construct
  REGION 1..8: note = Amino acid sequence
ISYDGSNK

SEQ ID NO: 5873 - protein, 8 aa, synthetic construct
  REGION 1..8: note = Amino acid sequence
ISSSGSTI

SEQ ID NO: 5874 - protein, 8 aa, synthetic construct
  REGION 1..8: note = Amino acid sequence
ISSSSSTI

SEQ ID NO: 5875 - protein, 7 aa, synthetic construct
  REGION 1..7: note = Amino acid sequence
IDWDDDK

SEQ ID NO: 5876 - protein, 8 aa, synthetic construct
  REGION 1..8: note = Amino acid sequence
IKQDGSEK

SEQ ID NO: 5877 - protein, 8 aa, synthetic construct
  REGION 1..8: note = Amino acid sequence
FVGSGDTT

SEQ ID NO: 5878 - protein, 8 aa, synthetic construct
  REGION 1..8: note = Amino acid sequence
ISSSSSTK

SEQ ID NO: 5879 - protein, 8 aa, synthetic construct
  REGION 1..8: note = Amino acid sequence
INPKTGAT

SEQ ID NO: 5880 - protein, 7 aa, synthetic construct
  REGION 1..7: note = Amino acid sequence
IYASGST

SEQ ID NO: 5881 - protein, 8 aa, synthetic construct
  REGION 1..8: note = Amino acid sequence
IYPGDSDT

SEQ ID NO: 5882 - protein, 10 aa, synthetic construct
  REGION 1..10: note = Amino acid sequence
IKSKTDGGTT

SEQ ID NO: 5883 - protein, 8 aa, synthetic construct
  REGION 1..8: note = Amino acid sequence
ISKDGNSK

SEQ ID NO: 5884 - protein, 10 aa, synthetic construct
  REGION 1..10: note = Amino acid sequence
IRSKTKNYAT

SEQ ID NO: 5885 - protein, 7 aa, synthetic construct
  REGION 1..7: note = Amino acid sequence
IYTSGST

SEQ ID NO: 5886 - protein, 10 aa, synthetic construct
  REGION 1..10: note = Amino acid sequence
ISTKGYDETA

SEQ ID NO: 5887 - protein, 8 aa, synthetic construct
  REGION 1..8: note = Amino acid sequence
IPYDGSNK

SEQ ID NO: 5888 - protein, 8 aa, synthetic construct
  REGION 1..8: note = Amino acid sequence
ISTSTSTI

SEQ ID NO: 5889 - protein, 8 aa, synthetic construct
  REGION 1..8: note = Amino acid sequence
ISSSGSTI

SEQ ID NO: 5890 - protein, 8 aa, synthetic construct
  REGION 1..8: note = Amino acid sequence
ISSSSSTI

SEQ ID NO: 5891 - protein, 7 aa, synthetic construct
  REGION 1..7: note = Amino acid sequence
MYSGGAT

SEQ ID NO: 5892 - protein, 8 aa, synthetic construct
  REGION 1..8: note = Amino acid sequence
IYPGDSDT

SEQ ID NO: 5893 - protein, 10 aa, synthetic construct
  REGION 1..10: note = Amino acid sequence
IRSKPNSYAT

SEQ ID NO: 5894 - protein, 8 aa, synthetic construct
  REGION 1..8: note = Amino acid sequence
IWYDGSNE

SEQ ID NO: 5895 - protein, 8 aa, synthetic construct
  REGION 1..8: note = Amino acid sequence
IWYDGSNK

SEQ ID NO: 5896 - protein, 7 aa, synthetic construct
  REGION 1..7: note = Amino acid sequence
LNSDGSH

SEQ ID NO: 5897 - protein, 7 aa, synthetic construct
  REGION 1..7: note = Amino acid sequence
QYSDSDK

SEQ ID NO: 5898 - protein, 14 aa, synthetic construct
  REGION 1..14: note = Amino acid sequence
ARVTLGSYFYGMDV

SEQ ID NO: 5899 - protein, 15 aa, synthetic construct
  REGION 1..15: note = Amino acid sequence
ARDGGSGSYFDCFDY

SEQ ID NO: 5900 - protein, 18 aa, synthetic construct
  REGION 1..18: note = Amino acid sequence
AKDINFFGLGTGGGAMDV

SEQ ID NO: 5901 - protein, 11 aa, synthetic construct
  REGION 1..11: note = Amino acid sequence
AHRAIVGLFDY

SEQ ID NO: 5902 - protein, 14 aa, synthetic construct
  REGION 1..14: note = Amino acid sequence
ARGGDGGPQDAFDI

SEQ ID NO: 5903 - protein, 17 aa, synthetic construct
  REGION 1..17: note = Amino acid sequence
VKSFSAEYYYYYYGMDV

SEQ ID NO: 5904 - protein, 15 aa, synthetic construct
  REGION 1..15: note = Amino acid sequence
ARVVPGDSVYGAFDI

SEQ ID NO: 5905 - protein, 13 aa, synthetic construct
  REGION 1..13: note = Amino acid sequence
AKRTPFGEWAFDY

SEQ ID NO: 5906 - protein, 17 aa, synthetic construct
  REGION 1..17: note = Amino acid sequence
AKDPGTFRDHLWSGVDY

SEQ ID NO: 5907 - protein, 16 aa, synthetic construct
  REGION 1..16: note = Amino acid sequence
AKAAATLPYFRFAMDV

SEQ ID NO: 5908 - protein, 17 aa, synthetic construct
  REGION 1..17: note = Amino acid sequence
ARVGVFKGLAPFGGFDP

SEQ ID NO: 5909 - protein, 11 aa, synthetic construct
  REGION 1..11: note = Amino acid sequence
ARDSGGTPGPY

SEQ ID NO: 5910 - protein, 16 aa, synthetic construct
  REGION 1..16: note = Amino acid sequence
VRSFVGAVPAYPNFDF

SEQ ID NO: 5911 - protein, 11 aa, synthetic construct
  REGION 1..11: note = Amino acid sequence
VRGVVGATLDN

SEQ ID NO: 5912 - protein, 17 aa, synthetic construct
  REGION 1..17: note = Amino acid sequence
VKDSRVTGQSSGYIFDS

SEQ ID NO: 5913 - protein, 11 aa, synthetic construct
  REGION 1..11: note = Amino acid sequence
ARPRLGWYFDL

SEQ ID NO: 5914 - protein, 13 aa, synthetic construct
  REGION 1..13: note = Amino acid sequence
ARETAGQLIPFDY

SEQ ID NO: 5915 - protein, 17 aa, synthetic construct
  REGION 1..17: note = Amino acid sequence
ARDYMGVDFYYYYGMDV

SEQ ID NO: 5916 - protein, 14 aa, synthetic construct
  REGION 1..14: note = Amino acid sequence
ARDIAVAITNYFGS

SEQ ID NO: 5917 - protein, 11 aa, synthetic construct
  REGION 1..11: note = Amino acid sequence
AREHRSGYQRY

SEQ ID NO: 5918 - protein, 11 aa, synthetic construct
  REGION 1..11: note = Amino acid sequence
AHFSTVINFGH

SEQ ID NO: 5919 - protein, 11 aa, synthetic construct
  REGION 1..11: note = Amino acid sequence
ACRRIYQGFDP

SEQ ID NO: 5920 - protein, 10 aa, synthetic construct
  REGION 1..10: note = Amino acid sequence
ARDRATSFDY

SEQ ID NO: 5921 - protein, 9 aa, synthetic construct
  REGION 1..9: note = Amino acid sequence
ARGRGEMDV

SEQ ID NO: 5922 - protein, 14 aa, synthetic construct
  REGION 1..14: note = Amino acid sequence
ATTPSSSWYWYFDP

SEQ ID NO: 5923 - protein, 16 aa, synthetic construct
  REGION 1..16: note = Amino acid sequence
ARDLELIIAAGAPLDH

SEQ ID NO: 5924 - protein, 16 aa, synthetic construct
  REGION 1..16: note = Amino acid sequence
ARLVTSPEEGGPWFDP

SEQ ID NO: 5925 - protein, 12 aa, synthetic construct
  REGION 1..12: note = Amino acid sequence
ARDTEVGHHFDY

SEQ ID NO: 5926 - protein, 11 aa, synthetic construct
  REGION 1..11: note = Amino acid sequence
AKPWRSDGFDV

SEQ ID NO: 5927 - protein, 11 aa, synthetic construct
  REGION 1..11: note = Amino acid sequence
AVGMVTDGFEI

SEQ ID NO: 5928 - protein, 12 aa, synthetic construct
  REGION 1..12: note = Amino acid sequence
ARLDLRTVRFDP

SEQ ID NO: 5929 - protein, 14 aa, synthetic construct
  REGION 1..14: note = Amino acid sequence
ARHSSGPPRLAFDI

SEQ ID NO: 5930 - protein, 13 aa, synthetic construct
  REGION 1..13: note = Amino acid sequence
AKDFAMPTVTTDY

SEQ ID NO: 5931 - protein, 13 aa, synthetic construct
  REGION 1..13: note = Amino acid sequence
VHRPSLAYWYFDV

SEQ ID NO: 5932 - protein, 14 aa, synthetic construct
  REGION 1..14: note = Amino acid sequence
VREGDSRKYYSLDY

SEQ ID NO: 5933 - protein, 13 aa, synthetic construct
  REGION 1..13: note = Amino acid sequence
ARDPMWVSYAFDI

SEQ ID NO: 5934 - protein, 9 aa, synthetic construct
  REGION 1..9: note = Amino acid sequence
ASGYVSFDL

SEQ ID NO: 5935 - protein, 16 aa, synthetic construct
  REGION 1..16: note = Amino acid sequence
AREGAYESSGPDPFDI

SEQ ID NO: 5936 - protein, 15 aa, synthetic construct
  REGION 1..15: note = Amino acid sequence
ASLFLTYYGSGTYYR

SEQ ID NO: 5937 - protein, 11 aa, synthetic construct
  REGION 1..11: note = Amino acid sequence
AKSTLGGGFDF

SEQ ID NO: 5938 - protein, 18 aa, synthetic construct
  REGION 1..18: note = Amino acid sequence
ARVGSSSWYSSGRSPFDY

SEQ ID NO: 5939 - protein, 16 aa, synthetic construct
  REGION 1..16: note = Amino acid sequence
AKDQIVLEMATSPFDY

SEQ ID NO: 5940 - protein, 17 aa, synthetic construct
  REGION 1..17: note = Amino acid sequence
ARDLSCSSTSCHDAFDI

SEQ ID NO: 5941 - protein, 16 aa, synthetic construct
  REGION 1..16: note = Amino acid sequence
ARGPNFHESIRDGFDI

SEQ ID NO: 5942 - protein, 12 aa, synthetic construct
  REGION 1..12: note = Amino acid sequence
ARVNWNSDTFDS

SEQ ID NO: 5943 - protein, 20 aa, synthetic construct
  REGION 1..20: note = Amino acid sequence
ARDPGRDPYLDLDYHYGMDV

SEQ ID NO: 5944 - protein, 16 aa, synthetic construct
  REGION 1..16: note = Amino acid sequence
ARDKRSGMTSDRRIDY

SEQ ID NO: 5945 - protein, 12 aa, synthetic construct
  REGION 1..12: note = Amino acid sequence
SGGYYSSSHMDV

SEQ ID NO: 5946 - protein, 13 aa, synthetic construct
  REGION 1..13: note = Amino acid sequence
ARVNIAAAGTLDY

SEQ ID NO: 5947 - protein, 21 aa, synthetic construct
  REGION 1..21: note = Amino acid sequence
VKDMGPAGTASAYHYHNGMDV

SEQ ID NO: 5948 - protein, 12 aa, synthetic construct
  REGION 1..12: note = Amino acid sequence
ARLTTSTSALSY

SEQ ID NO: 5949 - protein, 16 aa, synthetic construct
  REGION 1..16: note = Amino acid sequence
ARENWNSAGTTEWFDP

SEQ ID NO: 5950 - protein, 10 aa, synthetic construct
  REGION 1..10: note = Amino acid sequence
ARDTLQKGDY

SEQ ID NO: 5951 - protein, 19 aa, synthetic construct
  REGION 1..19: note = Amino acid sequence
ARASRVLESKSWHGDAFDV

SEQ ID NO: 5952 - protein, 13 aa, synthetic construct
  REGION 1..13: note = Amino acid sequence
ARGLGGSGYYFDY

SEQ ID NO: 5953 - protein, 17 aa, synthetic construct
  REGION 1..17: note = Amino acid sequence
ARQAFCGANCWSGAYDI

SEQ ID NO: 5954 - protein, 19 aa, synthetic construct
  REGION 1..19: note = Amino acid sequence
VRRGATVFQGKIIKGYMDV

SEQ ID NO: 5955 - protein, 10 aa, synthetic construct
  REGION 1..10: note = Amino acid sequence
AKVKGGSNDY

SEQ ID NO: 5956 - protein, 13 aa, synthetic construct
  REGION 1..13: note = Amino acid sequence
ARHLYGDFYYLDY

SEQ ID NO: 5957 - protein, 13 aa, synthetic construct
  REGION 1..13: note = Amino acid sequence
ARDHRTGSYYPDY

SEQ ID NO: 5958 - protein, 15 aa, synthetic construct
  REGION 1..15: note = Amino acid sequence
ARGVRQQQVRKWFDP

SEQ ID NO: 5959 - protein, 12 aa, synthetic construct
  REGION 1..12: note = Amino acid sequence
AMDNSGSGGVDY

SEQ ID NO: 5960 - protein, 12 aa, synthetic construct
  REGION 1..12: note = Amino acid sequence
ARDSYHYYGMDV

SEQ ID NO: 5961 - protein, 16 aa, synthetic construct
  REGION 1..16: note = Amino acid sequence
ARETVYISTYYYGLDV

SEQ ID NO: 5962 - protein, 13 aa, synthetic construct
  REGION 1..13: note = Amino acid sequence
ATDGPLHTSGLDY

SEQ ID NO: 5963 - protein, 13 aa, synthetic construct
  REGION 1..13: note = Amino acid sequence
ACLGAEANDAFDI

SEQ ID NO: 5964 - protein, 7 aa, synthetic construct
  REGION 1..7: note = Amino acid sequence
AKVPGDY

SEQ ID NO: 5965 - protein, 15 aa, synthetic construct
  REGION 1..15: note = Amino acid sequence
ARAGLSTSWPSWFDP

SEQ ID NO: 5966 - protein, 14 aa, synthetic construct
  REGION 1..14: note = Amino acid sequence
ARNDISFKQSAIDV

SEQ ID NO: 5967 - protein, 17 aa, synthetic construct
  REGION 1..17: note = Amino acid sequence
AKTKTMGVGGEYFGLDV

SEQ ID NO: 5968 - protein, 16 aa, synthetic construct
  REGION 1..16: note = Amino acid sequence
ARHKALWFGEAGAFDI

SEQ ID NO: 5969 - protein, 18 aa, synthetic construct
  REGION 1..18: note = Amino acid sequence
AKDLLGFRDQRNYYGMDV

SEQ ID NO: 5970 - protein, 13 aa, synthetic construct
  REGION 1..13: note = Amino acid sequence
ARSFYDTLFYFEN

SEQ ID NO: 5971 - protein, 12 aa, synthetic construct
  REGION 1..12: note = Amino acid sequence
ARVYSTKWDFDY

SEQ ID NO: 5972 - protein, 11 aa, synthetic construct
  REGION 1..11: note = Amino acid sequence
AKGGPLRPFDI

SEQ ID NO: 5973 - protein, 15 aa, synthetic construct
  REGION 1..15: note = Amino acid sequence
ARLSRDGYTIEHFDY

SEQ ID NO: 5974 - protein, 19 aa, synthetic construct
  REGION 1..19: note = Amino acid sequence
ARRGVSGGSAWTYYNFFDP

SEQ ID NO: 5975 - protein, 14 aa, synthetic construct
  REGION 1..14: note = Amino acid sequence
ARELPVIGRRTFDI

SEQ ID NO: 5976 - protein, 22 aa, synthetic construct
  REGION 1..22: note = Amino acid sequence
ARDSEVEKSDGYMASTAEYFQL

SEQ ID NO: 5977 - protein, 15 aa, synthetic construct
  REGION 1..15: note = Amino acid sequence
VKAGVPWEVQRWFDP

SEQ ID NO: 5978 - protein, 12 aa, synthetic construct
  REGION 1..12: note = Amino acid sequence
ARDRQGLGRMDV

SEQ ID NO: 5979 - protein, 12 aa, synthetic construct
  REGION 1..12: note = Amino acid sequence
ARELGANYYFAY

SEQ ID NO: 5980 - protein, 15 aa, synthetic construct
  REGION 1..15: note = Amino acid sequence
AREVDIRGDSDAFDI

SEQ ID NO: 5981 - protein, 10 aa, synthetic construct
  REGION 1..10: note = Amino acid sequence
ATTRNSAFLN

SEQ ID NO: 5982 - protein, 14 aa, synthetic construct
  REGION 1..14: note = Amino acid sequence
AKSAFGGVPDGFDI

SEQ ID NO: 5983 - protein, 7 aa, synthetic construct
  REGION 1..7: note = Amino acid sequence
ARDGFDY

SEQ ID NO: 5984 - protein, 13 aa, synthetic construct
  REGION 1..13: note = Amino acid sequence
AKAGYSFTTAPDY

SEQ ID NO: 5985 - protein, 14 aa, synthetic construct
  REGION 1..14: note = Amino acid sequence
ARERGQVRSYGMDV

SEQ ID NO: 5986 - protein, 19 aa, synthetic construct
  REGION 1..19: note = Amino acid sequence
VKIGGDGTAYAWTFRHFDS

SEQ ID NO: 5987 - protein, 13 aa, synthetic construct
  REGION 1..13: note = Amino acid sequence
ARGLGGDWNYLAY

SEQ ID NO: 5988 - protein, 21 aa, synthetic construct
  REGION 1..21: note = Amino acid sequence
AKEGGWGNTVTTSYYYYGMDV

SEQ ID NO: 5989 - protein, 14 aa, synthetic construct
  REGION 1..14: note = Amino acid sequence
TRDGGYFATGEFDY

SEQ ID NO: 5990 - protein, 12 aa, synthetic construct
  REGION 1..12: note = Amino acid sequence
ARERFGQGALDY

SEQ ID NO: 5991 - protein, 15 aa, synthetic construct
  REGION 1..15: note = Amino acid sequence
ATIVAAYSYGFEFDP

SEQ ID NO: 5992 - protein, 21 aa, synthetic construct
  REGION 1..21: note = Amino acid sequence
AKEGGWGNTVTTSYYYYGMDV

SEQ ID NO: 5993 - protein, 15 aa, synthetic construct
  REGION 1..15: note = Amino acid sequence
ARQGFEALVIRGFDY

SEQ ID NO: 5994 - protein, 15 aa, synthetic construct
  REGION 1..15: note = Amino acid sequence
ARRSTSSPSFSTLDV

SEQ ID NO: 5995 - protein, 10 aa, synthetic construct
  REGION 1..10: note = Amino acid sequence
ARQMVTTRGY

SEQ ID NO: 5996 - protein, 16 aa, synthetic construct
  REGION 1..16: note = Amino acid sequence
ARVPSRYGRSRGAFDI

SEQ ID NO: 5997 - protein, 12 aa, synthetic construct
  REGION 1..12: note = Amino acid sequence
ARNLYRLGWFDP

SEQ ID NO: 5998 - protein, 13 aa, synthetic construct
  REGION 1..13: note = Amino acid sequence
AKSKGNYRDAMDV

SEQ ID NO: 5999 - protein, 14 aa, synthetic construct
  REGION 1..14: note = Amino acid sequence
ATSYTVTTFYGMDV

SEQ ID NO: 6000 - protein, 12 aa, synthetic construct
  REGION 1..12: note = Amino acid sequence
ARGAAFYYGMDV

SEQ ID NO: 6001 - protein, 15 aa, synthetic construct
  REGION 1..15: note = Amino acid sequence
ARDTYGDPRGDYFDY

SEQ ID NO: 6002 - protein, 17 aa, synthetic construct
  REGION 1..17: note = Amino acid sequence
ARLWGSGDWWPSLYFDS

SEQ ID NO: 6003 - protein, 12 aa, synthetic construct
  REGION 1..12: note = Amino acid sequence
ARIRRIAATSFD

SEQ ID NO: 6004 - protein, 16 aa, synthetic construct
  REGION 1..16: note = Amino acid sequence
AKIARRPPSFYDYMDV

SEQ ID NO: 6005 - protein, 16 aa, synthetic construct
  REGION 1..16: note = Amino acid sequence
ARSTSSSTSDFHYMDV

SEQ ID NO: 6006 - protein, 10 aa, synthetic construct
  REGION 1..10: note = Amino acid sequence
TRGWAFTSSD

SEQ ID NO: 6007 - protein, 8 aa, synthetic construct
  REGION 1..8: note = Amino acid sequence
AGGWALGY

SEQ ID NO: 6008 - protein, 10 aa, synthetic construct
  REGION 1..10: note = Amino acid sequence
ARHRIFGLDV

SEQ ID NO: 6009 - protein, 19 aa, synthetic construct
  REGION 1..19: note = Amino acid sequence
ARRGPTDTWSGEVGYYFDY

SEQ ID NO: 6010 - protein, 16 aa, synthetic construct
  REGION 1..16: note = Amino acid sequence
ARDGKTLGYGGNSVDY

SEQ ID NO: 6011 - protein, 15 aa, synthetic construct
  REGION 1..15: note = Amino acid sequence
ARTETKWEDRGLWDY

SEQ ID NO: 6012 - protein, 10 aa, synthetic construct
  REGION 1..10: note = Amino acid sequence
ARSFYGSGLQ

SEQ ID NO: 6013 - protein, 13 aa, synthetic construct
  REGION 1..13: note = Amino acid sequence
ARAMGGYTYYLDD

SEQ ID NO: 6014 - protein, 17 aa, synthetic construct
  REGION 1..17: note = Amino acid sequence
ARAGKDGYNFFYYGMDV

SEQ ID NO: 6015 - protein, 15 aa, synthetic construct
  REGION 1..15: note = Amino acid sequence
ARGIMTTAISYYFDY

SEQ ID NO: 6016 - protein, 18 aa, synthetic construct
  REGION 1..18: note = Amino acid sequence
AKGERDLTDYGDPEYFQH

SEQ ID NO: 6017 - protein, 18 aa, synthetic construct
  REGION 1..18: note = Amino acid sequence
AKDLRYCSARSSCFGIDF

SEQ ID NO: 6018 - protein, 9 aa, synthetic construct
  REGION 1..9: note = Amino acid sequence
ARRAYSFDY

SEQ ID NO: 6019 - protein, 18 aa, synthetic construct
  REGION 1..18: note = Amino acid sequence
AREGAPDDYGDSGTAFDI

SEQ ID NO: 6020 - protein, 12 aa, synthetic construct
  REGION 1..12: note = Amino acid sequence
TTDHPYGDYSDN

SEQ ID NO: 6021 - protein, 10 aa, synthetic construct
  REGION 1..10: note = Amino acid sequence
AKELLGGFDY

SEQ ID NO: 6022 - protein, 13 aa, synthetic construct
  REGION 1..13: note = Amino acid sequence
ARVFGSAAGAFDI

SEQ ID NO: 6023 - protein, 12 aa, synthetic construct
  REGION 1..12: note = Amino acid sequence
ARHDWRLYAFDY

SEQ ID NO: 6024 - protein, 9 aa, synthetic construct
  REGION 1..9: note = Amino acid sequence
AGGETSPDY

SEQ ID NO: 6025 - protein, 15 aa, synthetic construct
  REGION 1..15: note = Amino acid sequence
VSRGPLGGAAAGPDY

SEQ ID NO: 6026 - protein, 10 aa, synthetic construct
  REGION 1..10: note = Amino acid sequence
ARDVRGWFVP

SEQ ID NO: 6027 - protein, 19 aa, synthetic construct
  REGION 1..19: note = Amino acid sequence
VRDRNIVSVPGAIPYGMDV

SEQ ID NO: 6028 - protein, 9 aa, synthetic construct
  REGION 1..9: note = Amino acid sequence
ARGSDTLDY

SEQ ID NO: 6029 - protein, 12 aa, synthetic construct
  REGION 1..12: note = Amino acid sequence
ARVGLTFALFDP

SEQ ID NO: 6030 - protein, 17 aa, synthetic construct
  REGION 1..17: note = Amino acid sequence
ANSAGIQLWSSDNWFDP

SEQ ID NO: 6031 - protein, 10 aa, synthetic construct
  REGION 1..10: note = Amino acid sequence
AKEGIELMIL

SEQ ID NO: 6032 - protein, 14 aa, synthetic construct
  REGION 1..14: note = Amino acid sequence
ARGITLTRGVSFDY

SEQ ID NO: 6033 - protein, 9 aa, synthetic construct
  REGION 1..9: note = Amino acid sequence
ARDGGAFDI

SEQ ID NO: 6034 - protein, 16 aa, synthetic construct
  REGION 1..16: note = Amino acid sequence
ARDRLFTAINSGYFDY

SEQ ID NO: 6035 - protein, 11 aa, synthetic construct
  REGION 1..11: note = Amino acid sequence
AREGSYYGIGY

SEQ ID NO: 6036 - protein, 14 aa, synthetic construct
  REGION 1..14: note = Amino acid sequence
ARDTDSGWLDSFDY

SEQ ID NO: 6037 - protein, 21 aa, synthetic construct
  REGION 1..21: note = Amino acid sequence
ATDQGCDDGSCYVGHYYGMDV

SEQ ID NO: 6038 - protein, 10 aa, synthetic construct
  REGION 1..10: note = Amino acid sequence
GRIMTPSIDL

SEQ ID NO: 6039 - protein, 13 aa, synthetic construct
  REGION 1..13: note = Amino acid sequence
AREGRGGGDFFDY

SEQ ID NO: 6040 - protein, 15 aa, synthetic construct
  REGION 1..15: note = Amino acid sequence
AKDGDSLGDFSTFDI

SEQ ID NO: 6041 - protein, 12 aa, synthetic construct
  REGION 1..12: note = Amino acid sequence
ARDGYDFRAFDH

SEQ ID NO: 6042 - protein, 20 aa, synthetic construct
  REGION 1..20: note = Amino acid sequence
ARARGGGFCSNMDCPAMFDY

SEQ ID NO: 6043 - protein, 9 aa, synthetic construct
  REGION 1..9: note = Amino acid sequence
TTIHDYGDH

SEQ ID NO: 6044 - protein, 10 aa, synthetic construct
  REGION 1..10: note = Amino acid sequence
ARGLLRSLDV

SEQ ID NO: 6045 - protein, 14 aa, synthetic construct
  REGION 1..14: note = Amino acid sequence
ARVKLGASSRVFDV

SEQ ID NO: 6046 - protein, 13 aa, synthetic construct
  REGION 1..13: note = Amino acid sequence
ATTVTPKVTSFAS

SEQ ID NO: 6047 - protein, 15 aa, synthetic construct
  REGION 1..15: note = Amino acid sequence
AREQSPLYFGPSLDV

SEQ ID NO: 6048 - protein, 12 aa, synthetic construct
  REGION 1..12: note = Amino acid sequence
AREPYSSYAMDV

SEQ ID NO: 6049 - protein, 12 aa, synthetic construct
  REGION 1..12: note = Amino acid sequence
AKDGSEMLLCDY

SEQ ID NO: 6050 - protein, 11 aa, synthetic construct
  REGION 1..11: note = Amino acid sequence
ARDTRWRGLDS

SEQ ID NO: 6051 - protein, 13 aa, synthetic construct
  REGION 1..13: note = Amino acid sequence
AKDLLAVPGLLDD

SEQ ID NO: 6052 - protein, 14 aa, synthetic construct
  REGION 1..14: note = Amino acid sequence
ASRGGSSRRYGMGV

SEQ ID NO: 6053 - protein, 16 aa, synthetic construct
  REGION 1..16: note = Amino acid sequence
VKLKGIGAMWTYAMDV

SEQ ID NO: 6054 - protein, 18 aa, synthetic construct
  REGION 1..18: note = Amino acid sequence
ARDQGYGDYDYPRDWIEP

SEQ ID NO: 6055 - protein, 16 aa, synthetic construct
  REGION 1..16: note = Amino acid sequence
ASVRDLVSGTTYYYHY

SEQ ID NO: 6056 - protein, 10 aa, synthetic construct
  REGION 1..10: note = Amino acid sequence
ARYGDYSFDP

SEQ ID NO: 6057 - protein, 13 aa, synthetic construct
  REGION 1..13: note = Amino acid sequence
ARVVDTVLADFDY

SEQ ID NO: 6058 - protein, 14 aa, synthetic construct
  REGION 1..14: note = Amino acid sequence
ARSGGFGWSRDLDY

SEQ ID NO: 6059 - protein, 16 aa, synthetic construct
  REGION 1..16: note = Amino acid sequence
ARHGFWSGPIPDAFDI

SEQ ID NO: 6060 - protein, 12 aa, synthetic construct
  REGION 1..12: note = Amino acid sequence
AHEDYGSGNGNY

SEQ ID NO: 6061 - protein, 15 aa, synthetic construct
  REGION 1..15: note = Amino acid sequence
ARDRDSGYERNCLDP

SEQ ID NO: 6062 - protein, 22 aa, synthetic construct
  REGION 1..22: note = Amino acid sequence
ARGAPYGSRIYYDYDSYHGMDV

SEQ ID NO: 6063 - protein, 16 aa, synthetic construct
  REGION 1..16: note = Amino acid sequence
ARGKFDWFPRVSSFDY

SEQ ID NO: 6064 - protein, 13 aa, synthetic construct
  REGION 1..13: note = Amino acid sequence
AAAYYIDTSGFDY

SEQ ID NO: 6065 - protein, 18 aa, synthetic construct
  REGION 1..18: note = Amino acid sequence
AKGRTYSNNWLFHWYFDL

SEQ ID NO: 6066 - protein, 13 aa, synthetic construct
  REGION 1..13: note = Amino acid sequence
ARVFSTIFHGVDP

SEQ ID NO: 6067 - protein, 15 aa, synthetic construct
  REGION 1..15: note = Amino acid sequence
ARHLSSGEYHYGLDV

SEQ ID NO: 6068 - protein, 13 aa, synthetic construct
  REGION 1..13: note = Amino acid sequence
AKGKGIVGATFDY

SEQ ID NO: 6069 - protein, 18 aa, synthetic construct
  REGION 1..18: note = Amino acid sequence
ARDALDFDWLLSAGGFDY

SEQ ID NO: 6070 - protein, 11 aa, synthetic construct
  REGION 1..11: note = Amino acid sequence
ARLLVGGAFDI

SEQ ID NO: 6071 - protein, 18 aa, synthetic construct
  REGION 1..18: note = Amino acid sequence
TPGSCSGGSCYSGDAFDI

SEQ ID NO: 6072 - protein, 15 aa, synthetic construct
  REGION 1..15: note = Amino acid sequence
ARESLDSASYSTIAH

SEQ ID NO: 6073 - protein, 15 aa, synthetic construct
  REGION 1..15: note = Amino acid sequence
ARDRGGNSWLDVFDM

SEQ ID NO: 6074 - protein, 15 aa, synthetic construct
  REGION 1..15: note = Amino acid sequence
ARSPAAFGSESYFDS

SEQ ID NO: 6075 - protein, 17 aa, synthetic construct
  REGION 1..17: note = Amino acid sequence
AKDLLEDPYFGDLLFDY

SEQ ID NO: 6076 - protein, 12 aa, synthetic construct
  REGION 1..12: note = Amino acid sequence
VRTPAVGTDPDY

SEQ ID NO: 6077 - protein, 12 aa, synthetic construct
  REGION 1..12: note = Amino acid sequence
SSGGSTSMVGRY

SEQ ID NO: 6078 - protein, 14 aa, synthetic construct
  REGION 1..14: note = Amino acid sequence
ARMTPFKFGLCPDY

SEQ ID NO: 6079 - protein, 14 aa, synthetic construct
  REGION 1..14: note = Amino acid sequence
ARVVVVGTDYGMDV

SEQ ID NO: 6080 - protein, 14 aa, synthetic construct
  REGION 1..14: note = Amino acid sequence
ARDQGLERANWFDP

SEQ ID NO: 6081 - protein, 9 aa, synthetic construct
  REGION 1..9: note = Amino acid sequence
ARGVRHFDY

SEQ ID NO: 6082 - protein, 12 aa, synthetic construct
  REGION 1..12: note = Amino acid sequence
ARESPLTVVFDY

SEQ ID NO: 6083 - protein, 11 aa, synthetic construct
  REGION 1..11: note = Amino acid sequence
ARESSAAGYDY

SEQ ID NO: 6084 - protein, 16 aa, synthetic construct
  REGION 1..16: note = Amino acid sequence
ARKLMSGIVSRGWFDP

SEQ ID NO: 6085 - protein, 14 aa, synthetic construct
  REGION 1..14: note = Amino acid sequence
ARDRGDYVTHWFDP

SEQ ID NO: 6086 - protein, 13 aa, synthetic construct
  REGION 1..13: note = Amino acid sequence
ARHRVGDSPGLHY

SEQ ID NO: 6087 - protein, 12 aa, synthetic construct
  REGION 1..12: note = Amino acid sequence
ASPIAVAAPFAY

SEQ ID NO: 6088 - protein, 17 aa, synthetic construct
  REGION 1..17: note = Amino acid sequence
VKDYLAVGGTYYDYFDY

SEQ ID NO: 6089 - protein, 11 aa, synthetic construct
  REGION 1..11: note = Amino acid sequence
ARHDYRNYFDY

SEQ ID NO: 6090 - protein, 15 aa, synthetic construct
  REGION 1..15: note = Amino acid sequence
ATPPSRYGGNYYADY

SEQ ID NO: 6091 - protein, 11 aa, synthetic construct
  REGION 1..11: note = Amino acid sequence
ARQGPTVAIDF

SEQ ID NO: 6092 - protein, 9 aa, synthetic construct
  REGION 1..9: note = Amino acid sequence
ARRGREFDY

SEQ ID NO: 6093 - protein, 17 aa, synthetic construct
  REGION 1..17: note = Amino acid sequence
AIQEKRELQLRRELDNY

SEQ ID NO: 6094 - protein, 10 aa, synthetic construct
  REGION 1..10: note = Amino acid sequence
ARVFRYGMDV

SEQ ID NO: 6095 - protein, 10 aa, synthetic construct
  REGION 1..10: note = Amino acid sequence
AIKEGYGLSD

SEQ ID NO: 6096 - protein, 12 aa, synthetic construct
  REGION 1..12: note = Amino acid sequence
AKEDGYTQNFDY

SEQ ID NO: 6097 - protein, 14 aa, synthetic construct
  REGION 1..14: note = Amino acid sequence
ARVLDFYGSSVLDY

SEQ ID NO: 6098 - protein, 8 aa, synthetic construct
  REGION 1..8: note = Amino acid sequence
ARDRPGDY

SEQ ID NO: 6099 - protein, 11 aa, synthetic construct
  REGION 1..11: note = Amino acid sequence
ARDLGVGSTTY

SEQ ID NO: 6100 - protein, 14 aa, synthetic construct
  REGION 1..14: note = Amino acid sequence
VKDLEVSIGHNFDF

SEQ ID NO: 6101 - protein, 20 aa, synthetic construct
  REGION 1..20: note = Amino acid sequence
ARDRGVVVVAATPYYYGMDV

SEQ ID NO: 6102 - protein, 17 aa, synthetic construct
  REGION 1..17: note = Amino acid sequence
VHARDDYGDSAWSTGPV

SEQ ID NO: 6103 - protein, 17 aa, synthetic construct
  REGION 1..17: note = Amino acid sequence
GHRRLLRGVTTTVYFDP

SEQ ID NO: 6104 - protein, 17 aa, synthetic construct
  REGION 1..17: note = Amino acid sequence
ARGGELLGGFGYSGMDV

SEQ ID NO: 6105 - protein, 19 aa, synthetic construct
  REGION 1..19: note = Amino acid sequence
AHYYYDSSGYYQNAEYFQY

SEQ ID NO: 6106 - protein, 21 aa, synthetic construct
  REGION 1..21: note = Amino acid sequence
ARTQWGTDVEATNPYYYFMDV

SEQ ID NO: 6107 - protein, 12 aa, synthetic construct
  REGION 1..12: note = Amino acid sequence
ARDQSGADRFDS

SEQ ID NO: 6108 - protein, 13 aa, synthetic construct
  REGION 1..13: note = Amino acid sequence
ARSSKWTDWHFDY

SEQ ID NO: 6109 - protein, 14 aa, synthetic construct
  REGION 1..14: note = Amino acid sequence
ARDLDEINSSWLDP

SEQ ID NO: 6110 - protein, 17 aa, synthetic construct
  REGION 1..17: note = Amino acid sequence
AKRPTAGNSYGGYYFDH

SEQ ID NO: 6111 - protein, 19 aa, synthetic construct
  REGION 1..19: note = Amino acid sequence
ARRGEVGTMVRVFRKPFDY

SEQ ID NO: 6112 - protein, 18 aa, synthetic construct
  REGION 1..18: note = Amino acid sequence
ATTSTMPMPTRGRDWFDP

SEQ ID NO: 6113 - protein, 11 aa, synthetic construct
  REGION 1..11: note = Amino acid sequence
AGAHGDYGLDY

SEQ ID NO: 6114 - protein, 15 aa, synthetic construct
  REGION 1..15: note = Amino acid sequence
ARHQQKYSPISPLDY

SEQ ID NO: 6115 - protein, 13 aa, synthetic construct
  REGION 1..13: note = Amino acid sequence
AKDARLAYYGMDV

SEQ ID NO: 6116 - protein, 12 aa, synthetic construct
  REGION 1..12: note = Amino acid sequence
ARHSSGYSELAY

SEQ ID NO: 6117 - protein, 14 aa, synthetic construct
  REGION 1..14: note = Amino acid sequence
ARVHNWDFYYGMDV

SEQ ID NO: 6118 - protein, 15 aa, synthetic construct
  REGION 1..15: note = Amino acid sequence
TRERPPNCGSSCPET

SEQ ID NO: 6119 - protein, 12 aa, synthetic construct
  REGION 1..12: note = Amino acid sequence
ARVGTSHWYSDS

SEQ ID NO: 6120 - protein, 10 aa, synthetic construct
  REGION 1..10: note = Amino acid sequence
ARDEGRREGA

SEQ ID NO: 6121 - protein, 13 aa, synthetic construct
  REGION 1..13: note = Amino acid sequence
ARDIALGRGGMDV

SEQ ID NO: 6122 - protein, 12 aa, synthetic construct
  REGION 1..12: note = Amino acid sequence
ARHRTGQYYYNS

SEQ ID NO: 6123 - protein, 11 aa, synthetic construct
  REGION 1..11: note = Amino acid sequence
AASGYGDHVAY

SEQ ID NO: 6124 - protein, 16 aa, synthetic construct
  REGION 1..16: note = Amino acid sequence
ARGNGPKSGKYSDFDY

SEQ ID NO: 6125 - protein, 10 aa, synthetic construct
  REGION 1..10: note = Amino acid sequence
ARDKSWYFDY

SEQ ID NO: 6126 - protein, 15 aa, synthetic construct
  REGION 1..15: note = Amino acid sequence
ARSTASSGYYDAFDI

SEQ ID NO: 6127 - protein, 22 aa, synthetic construct
  REGION 1..22: note = Amino acid sequence
ARDRREYSSSSRPSYHYYYMDV

SEQ ID NO: 6128 - protein, 13 aa, synthetic construct
  REGION 1..13: note = Amino acid sequence
ASRYRSPSGAFDI

SEQ ID NO: 6129 - protein, 8 aa, synthetic construct
  REGION 1..8: note = Amino acid sequence
TRGAVADY

SEQ ID NO: 6130 - protein, 14 aa, synthetic construct
  REGION 1..14: note = Amino acid sequence
ATSHGGLVPGGENY

SEQ ID NO: 6131 - protein, 16 aa, synthetic construct
  REGION 1..16: note = Amino acid sequence
VREEFGVVRGPNPFDV

SEQ ID NO: 6132 - protein, 19 aa, synthetic construct
  REGION 1..19: note = Amino acid sequence
AKTRSYSSADTTRPNAPGY

SEQ ID NO: 6133 - protein, 15 aa, synthetic construct
  REGION 1..15: note = Amino acid sequence
AKDGQTGTTTPYFDY

SEQ ID NO: 6134 - protein, 10 aa, synthetic construct
  REGION 1..10: note = Amino acid sequence
ARAGAEGVDY

SEQ ID NO: 6135 - protein, 14 aa, synthetic construct
  REGION 1..14: note = Amino acid sequence
ARRSDKAVPGTFDQ

SEQ ID NO: 6136 - protein, 15 aa, synthetic construct
  REGION 1..15: note = Amino acid sequence
AHRGGKNPRYWYFDL

SEQ ID NO: 6137 - protein, 13 aa, synthetic construct
  REGION 1..13: note = Amino acid sequence
ARGEGGELWAFDY

SEQ ID NO: 6138 - protein, 14 aa, synthetic construct
  REGION 1..14: note = Amino acid sequence
AREGLRLARGWFHP

SEQ ID NO: 6139 - protein, 12 aa, synthetic construct
  REGION 1..12: note = Amino acid sequence
ARDFDDGYDIRY

SEQ ID NO: 6140 - protein, 13 aa, synthetic construct
  REGION 1..13: note = Amino acid sequence
VKSPVAANDAFDI

SEQ ID NO: 6141 - protein, 13 aa, synthetic construct
  REGION 1..13: note = Amino acid sequence
ARVSVAAPTCLDY

SEQ ID NO: 6142 - protein, 15 aa, synthetic construct
  REGION 1..15: note = Amino acid sequence
ARHSGHDQLPLDFDN

SEQ ID NO: 6143 - protein, 9 aa, synthetic construct
  REGION 1..9: note = Amino acid sequence
AGGGSQVDF

SEQ ID NO: 6144 - protein, 17 aa, synthetic construct
  REGION 1..17: note = Amino acid sequence
AHRFGRGVSYYYYGMDV

SEQ ID NO: 6145 - protein, 12 aa, synthetic construct
  REGION 1..12: note = Amino acid sequence
AKDSGSNDDMDV

SEQ ID NO: 6146 - protein, 13 aa, synthetic construct
  REGION 1..13: note = Amino acid sequence
ARRGFYYYYGMDV

SEQ ID NO: 6147 - protein, 10 aa, synthetic construct
  REGION 1..10: note = Amino acid sequence
ASLLGGDPDY

SEQ ID NO: 6148 - protein, 20 aa, synthetic construct
  REGION 1..20: note = Amino acid sequence
ARMQIVATTQTYYYYYGMDV

SEQ ID NO: 6149 - protein, 13 aa, synthetic construct
  REGION 1..13: note = Amino acid sequence
ARAGYDLFGWFDP

SEQ ID NO: 6150 - protein, 19 aa, synthetic construct
  REGION 1..19: note = Amino acid sequence
AKPNSPFTGSGSFHNYFDY

SEQ ID NO: 6151 - protein, 6 aa, synthetic construct
  REGION 1..6: note = Amino acid sequence
ASPVRP

SEQ ID NO: 6152 - protein, 21 aa, synthetic construct
  REGION 1..21: note = Amino acid sequence
ARGFCDLPACYPVPQYNWFDP

SEQ ID NO: 6153 - protein, 13 aa, synthetic construct
  REGION 1..13: note = Amino acid sequence
ARYSGSYPLGFDY

SEQ ID NO: 6154 - protein, 9 aa, synthetic construct
  REGION 1..9: note = Amino acid sequence
ARHEGAFDI

SEQ ID NO: 6155 - protein, 12 aa, synthetic construct
  REGION 1..12: note = Amino acid sequence
TTDLAVTTRFDY

SEQ ID NO: 6156 - protein, 11 aa, synthetic construct
  REGION 1..11: note = Amino acid sequence
ARSTRTDALDV

SEQ ID NO: 6157 - protein, 13 aa, synthetic construct
  REGION 1..13: note = Amino acid sequence
AKNDEMDFKGYDY

SEQ ID NO: 6158 - protein, 9 aa, synthetic construct
  REGION 1..9: note = Amino acid sequence
ARGELLFDH

SEQ ID NO: 6159 - protein, 10 aa, synthetic construct
  REGION 1..10: note = Amino acid sequence
ARESTVVLDF

SEQ ID NO: 6160 - protein, 12 aa, synthetic construct
  REGION 1..12: note = Amino acid sequence
AKRSTAVGDFDP

SEQ ID NO: 6161 - protein, 16 aa, synthetic construct
  REGION 1..16: note = Amino acid sequence
ARGPSNWNGGPEHMDV

SEQ ID NO: 6162 - protein, 6 aa, synthetic construct
  REGION 1..6: note = Amino acid sequence
ARDFDY

SEQ ID NO: 6163 - protein, 14 aa, synthetic construct
  REGION 1..14: note = Amino acid sequence
ARDPYGSGTVWFDP

SEQ ID NO: 6164 - protein, 20 aa, synthetic construct
  REGION 1..20: note = Amino acid sequence
AKTEYTFLSGSDYYQYGMDV

SEQ ID NO: 6165 - protein, 16 aa, synthetic construct
  REGION 1..16: note = Amino acid sequence
ARRGLLRGSNEGRFDY

SEQ ID NO: 6166 - protein, 15 aa, synthetic construct
  REGION 1..15: note = Amino acid sequence
TRRGSAWTDPYYTDV

SEQ ID NO: 6167 - protein, 11 aa, synthetic construct
  REGION 1..11: note = Amino acid sequence
ARDDVPRGYDY

SEQ ID NO: 6168 - protein, 13 aa, synthetic construct
  REGION 1..13: note = Amino acid sequence
AREYIVPFYGMDV

SEQ ID NO: 6169 - protein, 9 aa, synthetic construct
  REGION 1..9: note = Amino acid sequence
QQTNTFPLT

SEQ ID NO: 6170 - protein, 9 aa, synthetic construct
  REGION 1..9: note = Amino acid sequence
QQSYSTPPR

SEQ ID NO: 6171 - protein, 9 aa, synthetic construct
  REGION 1..9: note = Amino acid sequence
QQSNSFPGT

SEQ ID NO: 6172 - protein, 11 aa, synthetic construct
  REGION 1..11: note = Amino acid sequence
AAWEDSLSGPV

SEQ ID NO: 6173 - protein, 9 aa, synthetic construct
  REGION 1..9: note = Amino acid sequence
NSRDRSGYV

SEQ ID NO: 6174 - protein, 11 aa, synthetic construct
  REGION 1..11: note = Amino acid sequence
QVWDNGHSHWV

SEQ ID NO: 6175 - protein, 9 aa, synthetic construct
  REGION 1..9: note = Amino acid sequence
QQSYRMPCS

SEQ ID NO: 6176 - protein, 10 aa, synthetic construct
  REGION 1..10: note = Amino acid sequence
QQYGSSPPIT

SEQ ID NO: 6177 - protein, 9 aa, synthetic construct
  REGION 1..9: note = Amino acid sequence
QSYDTTNVI

SEQ ID NO: 6178 - protein, 9 aa, synthetic construct
  REGION 1..9: note = Amino acid sequence
QQYDSSPFT

SEQ ID NO: 6179 - protein, 10 aa, synthetic construct
  REGION 1..10: note = Amino acid sequence
GTWDDNLSAV

SEQ ID NO: 6180 - protein, 9 aa, synthetic construct
  REGION 1..9: note = Amino acid sequence
LQGTHWPPT

SEQ ID NO: 6181 - protein, 11 aa, synthetic construct
  REGION 1..11: note = Amino acid sequence
AAWDDNVSGPG

SEQ ID NO: 6182 - protein, 11 aa, synthetic construct
  REGION 1..11: note = Amino acid sequence
ATWDDSLNGPV

SEQ ID NO: 6183 - protein, 8 aa, synthetic construct
  REGION 1..8: note = Amino acid sequence
QQYNNWWT

SEQ ID NO: 6184 - protein, 9 aa, synthetic construct
  REGION 1..9: note = Amino acid sequence
QQYGSFRYT

SEQ ID NO: 6185 - protein, 10 aa, synthetic construct
  REGION 1..10: note = Amino acid sequence
QSADSSDTYV

SEQ ID NO: 6186 - protein, 9 aa, synthetic construct
  REGION 1..9: note = Amino acid sequence
QQRSNWPLT

SEQ ID NO: 6187 - protein, 10 aa, synthetic construct
  REGION 1..10: note = Amino acid sequence
QQGSNWLALT

SEQ ID NO: 6188 - protein, 9 aa, synthetic construct
  REGION 1..9: note = Amino acid sequence
QQYYINPRT

SEQ ID NO: 6189 - protein, 9 aa, synthetic construct
  REGION 1..9: note = Amino acid sequence
QQYYSTPYT

SEQ ID NO: 6190 - protein, 9 aa, synthetic construct
  REGION 1..9: note = Amino acid sequence
QQSFNTVLT

SEQ ID NO: 6191 - protein, 11 aa, synthetic construct
  REGION 1..11: note = Amino acid sequence
SSYTITSTLWV

SEQ ID NO: 6192 - protein, 11 aa, synthetic construct
  REGION 1..11: note = Amino acid sequence
AAWDDSLSGPV

SEQ ID NO: 6193 - protein, 9 aa, synthetic construct
  REGION 1..9: note = Amino acid sequence
QQTYSNPWT

SEQ ID NO: 6194 - protein, 9 aa, synthetic construct
  REGION 1..9: note = Amino acid sequence
QQTYSHPRT

SEQ ID NO: 6195 - protein, 11 aa, synthetic construct
  REGION 1..11: note = Amino acid sequence
QSYDSSLSGYV

SEQ ID NO: 6196 - protein, 11 aa, synthetic construct
  REGION 1..11: note = Amino acid sequence
QVWDSSSDHYV

SEQ ID NO: 6197 - protein, 9 aa, synthetic construct
  REGION 1..9: note = Amino acid sequence
QQTSSFPRT

SEQ ID NO: 6198 - protein, 10 aa, synthetic construct
  REGION 1..10: note = Amino acid sequence
QSVDITSTWV

SEQ ID NO: 6199 - protein, 11 aa, synthetic construct
  REGION 1..11: note = Amino acid sequence
SSYISSLTYVL

SEQ ID NO: 6200 - protein, 11 aa, synthetic construct
  REGION 1..11: note = Amino acid sequence
GTWDSSLSVGV

SEQ ID NO: 6201 - protein, 9 aa, synthetic construct
  REGION 1..9: note = Amino acid sequence
MQGTHWPIT

SEQ ID NO: 6202 - protein, 9 aa, synthetic construct
  REGION 1..9: note = Amino acid sequence
QQYDSSSWT

SEQ ID NO: 6203 - protein, 11 aa, synthetic construct
  REGION 1..11: note = Amino acid sequence
QSYDSSLRGVV

SEQ ID NO: 6204 - protein, 9 aa, synthetic construct
  REGION 1..9: note = Amino acid sequence
QQSYSTPRT

SEQ ID NO: 6205 - protein, 9 aa, synthetic construct
  REGION 1..9: note = Amino acid sequence
QQYYSTPWT

SEQ ID NO: 6206 - protein, 13 aa, synthetic construct
  REGION 1..13: note = Amino acid sequence
QSYDSGLSGSKVV

SEQ ID NO: 6207 - protein, 9 aa, synthetic construct
  REGION 1..9: note = Amino acid sequence
QSYDLSTWV

SEQ ID NO: 6208 - protein, 9 aa, synthetic construct
  REGION 1..9: note = Amino acid sequence
HQSYSTSLT

SEQ ID NO: 6209 - protein, 11 aa, synthetic construct
  REGION 1..11: note = Amino acid sequence
QVWDSSSDHWV

SEQ ID NO: 6210 - protein, 10 aa, synthetic construct
  REGION 1..10: note = Amino acid sequence
SSYTSSSTQV

SEQ ID NO: 6211 - protein, 9 aa, synthetic construct
  REGION 1..9: note = Amino acid sequence
QQSYSTPKT

SEQ ID NO: 6212 - protein, 10 aa, synthetic construct
  REGION 1..10: note = Amino acid sequence
QQFNTYPLYT

SEQ ID NO: 6213 - protein, 11 aa, synthetic construct
  REGION 1..11: note = Amino acid sequence
DSRDSSGNLVV

SEQ ID NO: 6214 - protein, 9 aa, synthetic construct
  REGION 1..9: note = Amino acid sequence
QQTNSFPRT

SEQ ID NO: 6215 - protein, 10 aa, synthetic construct
  REGION 1..10: note = Amino acid sequence
QQSYSVPPWT

SEQ ID NO: 6216 - protein, 10 aa, synthetic construct
  REGION 1..10: note = Amino acid sequence
QQYGSSPRYT

SEQ ID NO: 6217 - protein, 8 aa, synthetic construct
  REGION 1..8: note = Amino acid sequence
QQYGSAWT

SEQ ID NO: 6218 - protein, 10 aa, synthetic construct
  REGION 1..10: note = Amino acid sequence
QQRANWPPIT

SEQ ID NO: 6219 - protein, 9 aa, synthetic construct
  REGION 1..9: note = Amino acid sequence
QQYNSYPWT

SEQ ID NO: 6220 - protein, 12 aa, synthetic construct
  REGION 1..12: note = Amino acid sequence
QVWDSSSDHYVV

SEQ ID NO: 6221 - protein, 10 aa, synthetic construct
  REGION 1..10: note = Amino acid sequence
QQRSNWPPLT

SEQ ID NO: 6222 - protein, 9 aa, synthetic construct
  REGION 1..9: note = Amino acid sequence
MQALQTPYT

SEQ ID NO: 6223 - protein, 8 aa, synthetic construct
  REGION 1..8: note = Amino acid sequence
QQYNSYST

SEQ ID NO: 6224 - protein, 10 aa, synthetic construct
  REGION 1..10: note = Amino acid sequence
LLYMGSGISV

SEQ ID NO: 6225 - protein, 10 aa, synthetic construct
  REGION 1..10: note = Amino acid sequence
QHYGASPPWT

SEQ ID NO: 6226 - protein, 12 aa, synthetic construct
  REGION 1..12: note = Amino acid sequence
QVWDSNNDHREV

SEQ ID NO: 6227 - protein, 9 aa, synthetic construct
  REGION 1..9: note = Amino acid sequence
QQYDSYPLS

SEQ ID NO: 6228 - protein, 9 aa, synthetic construct
  REGION 1..9: note = Amino acid sequence
LQHDNFPYT

SEQ ID NO: 6229 - protein, 9 aa, synthetic construct
  REGION 1..9: note = Amino acid sequence
QQYGSSPLT

SEQ ID NO: 6230 - protein, 11 aa, synthetic construct
  REGION 1..11: note = Amino acid sequence
YSTDSSGNHGV

SEQ ID NO: 6231 - protein, 9 aa, synthetic construct
  REGION 1..9: note = Amino acid sequence
MQALQTPNT

SEQ ID NO: 6232 - protein, 11 aa, synthetic construct
  REGION 1..11: note = Amino acid sequence
NSYSSSSTLYV

SEQ ID NO: 6233 - protein, 10 aa, synthetic construct
  REGION 1..10: note = Amino acid sequence
QQHSNWPELT

SEQ ID NO: 6234 - protein, 10 aa, synthetic construct
  REGION 1..10: note = Amino acid sequence
SSYRSSGVYV

SEQ ID NO: 6235 - protein, 9 aa, synthetic construct
  REGION 1..9: note = Amino acid sequence
MQSIHLPYT

SEQ ID NO: 6236 - protein, 10 aa, synthetic construct
  REGION 1..10: note = Amino acid sequence
HQYGGSPPNT

SEQ ID NO: 6237 - protein, 10 aa, synthetic construct
  REGION 1..10: note = Amino acid sequence
QQLNSYPPLT

SEQ ID NO: 6238 - protein, 11 aa, synthetic construct
  REGION 1..11: note = Amino acid sequence
ATWDSSLTAGV

SEQ ID NO: 6239 - protein, 9 aa, synthetic construct
  REGION 1..9: note = Amino acid sequence
QQRSAWPIT

SEQ ID NO: 6240 - protein, 10 aa, synthetic construct
  REGION 1..10: note = Amino acid sequence
QQYGSSRKLT

SEQ ID NO: 6241 - protein, 9 aa, synthetic construct
  REGION 1..9: note = Amino acid sequence
QHYDSYPWT

SEQ ID NO: 6242 - protein, 11 aa, synthetic construct
  REGION 1..11: note = Amino acid sequence
CSRDSSGNPWV

SEQ ID NO: 6243 - protein, 9 aa, synthetic construct
  REGION 1..9: note = Amino acid sequence
QQSYSTSLT

SEQ ID NO: 6244 - protein, 11 aa, synthetic construct
  REGION 1..11: note = Amino acid sequence
QQYDSSPPMYT

SEQ ID NO: 6245 - protein, 12 aa, synthetic construct
  REGION 1..12: note = Amino acid sequence
GTWDSSLSPGGV

SEQ ID NO: 6246 - protein, 8 aa, synthetic construct
  REGION 1..8: note = Amino acid sequence
QQSYNART

SEQ ID NO: 6247 - protein, 10 aa, synthetic construct
  REGION 1..10: note = Amino acid sequence
QQYYDTAPLT

SEQ ID NO: 6248 - protein, 9 aa, synthetic construct
  REGION 1..9: note = Amino acid sequence
QQYSKWPIT

SEQ ID NO: 6249 - protein, 9 aa, synthetic construct
  REGION 1..9: note = Amino acid sequence
QQTYTTPRT

SEQ ID NO: 6250 - protein, 11 aa, synthetic construct
  REGION 1..11: note = Amino acid sequence
QSYDSRLSGVV

SEQ ID NO: 6251 - protein, 9 aa, synthetic construct
  REGION 1..9: note = Amino acid sequence
QQYTTRPLT

SEQ ID NO: 6252 - protein, 9 aa, synthetic construct
  REGION 1..9: note = Amino acid sequence
QQRSKWPLT

SEQ ID NO: 6253 - protein, 12 aa, synthetic construct
  REGION 1..12: note = Amino acid sequence
ATWDDSLGGRVV

SEQ ID NO: 6254 - protein, 9 aa, synthetic construct
  REGION 1..9: note = Amino acid sequence
MQRIEFPFT

SEQ ID NO: 6255 - protein, 9 aa, synthetic construct
  REGION 1..9: note = Amino acid sequence
QAWDSSTAV

SEQ ID NO: 6256 - protein, 9 aa, synthetic construct
  REGION 1..9: note = Amino acid sequence
QSWDSSSVL

SEQ ID NO: 6257 - protein, 9 aa, synthetic construct
  REGION 1..9: note = Amino acid sequence
QQYYGRLFT

SEQ ID NO: 6258 - protein, 11 aa, synthetic construct
  REGION 1..11: note = Amino acid sequence
QQRSNWPPRLP

SEQ ID NO: 6259 - protein, 10 aa, synthetic construct
  REGION 1..10: note = Amino acid sequence
QQRSNWPPYT

SEQ ID NO: 6260 - protein, 9 aa, synthetic construct
  REGION 1..9: note = Amino acid sequence
MQALQTPYT

SEQ ID NO: 6261 - protein, 9 aa, synthetic construct
  REGION 1..9: note = Amino acid sequence
QHYDSYIGT

SEQ ID NO: 6262 - protein, 11 aa, synthetic construct
  REGION 1..11: note = Amino acid sequence
GTWDSSLGGGV

SEQ ID NO: 6263 - protein, 10 aa, synthetic construct
  REGION 1..10: note = Amino acid sequence
QQRSNWPPYT

SEQ ID NO: 6264 - protein, 9 aa, synthetic construct
  REGION 1..9: note = Amino acid sequence
MEAEQTPGT

SEQ ID NO: 6265 - protein, 10 aa, synthetic construct
  REGION 1..10: note = Amino acid sequence
SSYTSSTTVL

SEQ ID NO: 6266 - protein, 10 aa, synthetic construct
  REGION 1..10: note = Amino acid sequence
MQGTHWPPIT

SEQ ID NO: 6267 - protein, 9 aa, synthetic construct
  REGION 1..9: note = Amino acid sequence
HQTYSTRLT

SEQ ID NO: 6268 - protein, 9 aa, synthetic construct
  REGION 1..9: note = Amino acid sequence
QQYDNLPLT

SEQ ID NO: 6269 - protein, 11 aa, synthetic construct
  REGION 1..11: note = Amino acid sequence
QVWDSSSDPWV

SEQ ID NO: 6270 - protein, 10 aa, synthetic construct
  REGION 1..10: note = Amino acid sequence
QQLNSYPPVT

SEQ ID NO: 6271 - protein, 9 aa, synthetic construct
  REGION 1..9: note = Amino acid sequence
QQSYSTPYT

SEQ ID NO: 6272 - protein, 10 aa, synthetic construct
  REGION 1..10: note = Amino acid sequence
QQYSSSSPRT

SEQ ID NO: 6273 - protein, 9 aa, synthetic construct
  REGION 1..9: note = Amino acid sequence
MQSLQLPIT

SEQ ID NO: 6274 - protein, 10 aa, synthetic construct
  REGION 1..10: note = Amino acid sequence
QQSYSTRLLT

SEQ ID NO: 6275 - protein, 11 aa, synthetic construct
  REGION 1..11: note = Amino acid sequence
QSFDSSLRGYV

SEQ ID NO: 6276 - protein, 11 aa, synthetic construct
  REGION 1..11: note = Amino acid sequence
QHRITWPPLIT

SEQ ID NO: 6277 - protein, 9 aa, synthetic construct
  REGION 1..9: note = Amino acid sequence
QQYAYVPIT

SEQ ID NO: 6278 - protein, 9 aa, synthetic construct
  REGION 1..9: note = Amino acid sequence
QQYYSIPLT

SEQ ID NO: 6279 - protein, 9 aa, synthetic construct
  REGION 1..9: note = Amino acid sequence
QQYGSSPLW

SEQ ID NO: 6280 - protein, 10 aa, synthetic construct
  REGION 1..10: note = Amino acid sequence
SSYTSSSTQV

SEQ ID NO: 6281 - protein, 11 aa, synthetic construct
  REGION 1..11: note = Amino acid sequence
YSTDSSGNHRV

SEQ ID NO: 6282 - protein, 10 aa, synthetic construct
  REGION 1..10: note = Amino acid sequence
QQYNNWPQYT

SEQ ID NO: 6283 - protein, 11 aa, synthetic construct
  REGION 1..11: note = Amino acid sequence
QHFRSSPPTYT

SEQ ID NO: 6284 - protein, 10 aa, synthetic construct
  REGION 1..10: note = Amino acid sequence
SSYSRTTTLV

SEQ ID NO: 6285 - protein, 12 aa, synthetic construct
  REGION 1..12: note = Amino acid sequence
QSYDSGLSAPWV

SEQ ID NO: 6286 - protein, 9 aa, synthetic construct
  REGION 1..9: note = Amino acid sequence
QQYGNSPPT

SEQ ID NO: 6287 - protein, 11 aa, synthetic construct
  REGION 1..11: note = Amino acid sequence
ATWDDDLSGPV

SEQ ID NO: 6288 - protein, 9 aa, synthetic construct
  REGION 1..9: note = Amino acid sequence
LQHDTFPLT

SEQ ID NO: 6289 - protein, 9 aa, synthetic construct
  REGION 1..9: note = Amino acid sequence
QQYNSYSWT

SEQ ID NO: 6290 - protein, 9 aa, synthetic construct
  REGION 1..9: note = Amino acid sequence
QHLTSFPYT

SEQ ID NO: 6291 - protein, 11 aa, synthetic construct
  REGION 1..11: note = Amino acid sequence
GSRDSSGNPSV

SEQ ID NO: 6292 - protein, 9 aa, synthetic construct
  REGION 1..9: note = Amino acid sequence
QQRSNWLYT

SEQ ID NO: 6293 - protein, 12 aa, synthetic construct
  REGION 1..12: note = Amino acid sequence
QVWDSSSDHQEV

SEQ ID NO: 6294 - protein, 10 aa, synthetic construct
  REGION 1..10: note = Amino acid sequence
CSYAPSNTYV

SEQ ID NO: 6295 - protein, 9 aa, synthetic construct
  REGION 1..9: note = Amino acid sequence
QQRSNWPLT

SEQ ID NO: 6296 - protein, 12 aa, synthetic construct
  REGION 1..12: note = Amino acid sequence
NSRDSSAHDHLL

SEQ ID NO: 6297 - protein, 10 aa, synthetic construct
  REGION 1..10: note = Amino acid sequence
QHFGDSPLYI

SEQ ID NO: 6298 - protein, 9 aa, synthetic construct
  REGION 1..9: note = Amino acid sequence
QVWDSSTAV

SEQ ID NO: 6299 - protein, 11 aa, synthetic construct
  REGION 1..11: note = Amino acid sequence
QVWDSSSDHVV

SEQ ID NO: 6300 - protein, 11 aa, synthetic construct
  REGION 1..11: note = Amino acid sequence
QSADSSGFYVV

SEQ ID NO: 6301 - protein, 9 aa, synthetic construct
  REGION 1..9: note = Amino acid sequence
QSADSSSPV

SEQ ID NO: 6302 - protein, 10 aa, synthetic construct
  REGION 1..10: note = Amino acid sequence
YSTDSRATGV

SEQ ID NO: 6303 - protein, 9 aa, synthetic construct
  REGION 1..9: note = Amino acid sequence
QQSYSTPQT

SEQ ID NO: 6304 - protein, 9 aa, synthetic construct
  REGION 1..9: note = Amino acid sequence
QQYENLPLT

SEQ ID NO: 6305 - protein, 9 aa, synthetic construct
  REGION 1..9: note = Amino acid sequence
QQFDNLPLT

SEQ ID NO: 6306 - protein, 10 aa, synthetic construct
  REGION 1..10: note = Amino acid sequence
SSYAGSYTWV

SEQ ID NO: 6307 - protein, 9 aa, synthetic construct
  REGION 1..9: note = Amino acid sequence
QAWDSSTVV

SEQ ID NO: 6308 - protein, 11 aa, synthetic construct
  REGION 1..11: note = Amino acid sequence
GTWDSSLGAYV

SEQ ID NO: 6309 - protein, 8 aa, synthetic construct
  REGION 1..8: note = Amino acid sequence
QQYGSSLT

SEQ ID NO: 6310 - protein, 9 aa, synthetic construct
  REGION 1..9: note = Amino acid sequence
QQYGSSPLT

SEQ ID NO: 6311 - protein, 10 aa, synthetic construct
  REGION 1..10: note = Amino acid sequence
SSYTSSRSLV

SEQ ID NO: 6312 - protein, 9 aa, synthetic construct
  REGION 1..9: note = Amino acid sequence
QQTYSTPWT

SEQ ID NO: 6313 - protein, 8 aa, synthetic construct
  REGION 1..8: note = Amino acid sequence
QQYNNWLT

SEQ ID NO: 6314 - protein, 9 aa, synthetic construct
  REGION 1..9: note = Amino acid sequence
YSTPDNNGV

SEQ ID NO: 6315 - protein, 10 aa, synthetic construct
  REGION 1..10: note = Amino acid sequence
SSYTTSNSVV

SEQ ID NO: 6316 - protein, 9 aa, synthetic construct
  REGION 1..9: note = Amino acid sequence
QQYDNSPLT

SEQ ID NO: 6317 - protein, 9 aa, synthetic construct
  REGION 1..9: note = Amino acid sequence
QQYWGTPYT

SEQ ID NO: 6318 - protein, 10 aa, synthetic construct
  REGION 1..10: note = Amino acid sequence
QSYDSGLGVV

SEQ ID NO: 6319 - protein, 10 aa, synthetic construct
  REGION 1..10: note = Amino acid sequence
SSYAGINNLV

SEQ ID NO: 6320 - protein, 9 aa, synthetic construct
  REGION 1..9: note = Amino acid sequence
QQYNSYSQT

SEQ ID NO: 6321 - protein, 9 aa, synthetic construct
  REGION 1..9: note = Amino acid sequence
QQYTDWPYT

SEQ ID NO: 6322 - protein, 8 aa, synthetic construct
  REGION 1..8: note = Amino acid sequence
QTWGTVGV

SEQ ID NO: 6323 - protein, 9 aa, synthetic construct
  REGION 1..9: note = Amino acid sequence
QQYGSSPWT

SEQ ID NO: 6324 - protein, 11 aa, synthetic construct
  REGION 1..11: note = Amino acid sequence
QSYDSSLSGYV

SEQ ID NO: 6325 - protein, 11 aa, synthetic construct
  REGION 1..11: note = Amino acid sequence
QCFDTSLTAKV

SEQ ID NO: 6326 - protein, 9 aa, synthetic construct
  REGION 1..9: note = Amino acid sequence
MQALQVPRT

SEQ ID NO: 6327 - protein, 9 aa, synthetic construct
  REGION 1..9: note = Amino acid sequence
QQLNSYPLT

SEQ ID NO: 6328 - protein, 11 aa, synthetic construct
  REGION 1..11: note = Amino acid sequence
AAWDDSLSGPV

SEQ ID NO: 6329 - protein, 9 aa, synthetic construct
  REGION 1..9: note = Amino acid sequence
MQALQTPWT

SEQ ID NO: 6330 - protein, 12 aa, synthetic construct
  REGION 1..12: note = Amino acid sequence
NSRDSSDDHLEV

SEQ ID NO: 6331 - protein, 9 aa, synthetic construct
  REGION 1..9: note = Amino acid sequence
QQYNSYPRT

SEQ ID NO: 6332 - protein, 9 aa, synthetic construct
  REGION 1..9: note = Amino acid sequence
QQYFTTPRT

SEQ ID NO: 6333 - protein, 12 aa, synthetic construct
  REGION 1..12: note = Amino acid sequence
AAWDDGLGGLYV

SEQ ID NO: 6334 - protein, 8 aa, synthetic construct
  REGION 1..8: note = Amino acid sequence
QQYNRGST

SEQ ID NO: 6335 - protein, 11 aa, synthetic construct
  REGION 1..11: note = Amino acid sequence
QVWDRNSHRVI

SEQ ID NO: 6336 - protein, 11 aa, synthetic construct
  REGION 1..11: note = Amino acid sequence
QSYDNSLSAWV

SEQ ID NO: 6337 - protein, 11 aa, synthetic construct
  REGION 1..11: note = Amino acid sequence
NSRDSSGNHWV

SEQ ID NO: 6338 - protein, 11 aa, synthetic construct
  REGION 1..11: note = Amino acid sequence
SSYIRSSTPVV

SEQ ID NO: 6339 - protein, 9 aa, synthetic construct
  REGION 1..9: note = Amino acid sequence
QQYYDTPYT

SEQ ID NO: 6340 - protein, 10 aa, synthetic construct
  REGION 1..10: note = Amino acid sequence
SSYTSSSTLV

SEQ ID NO: 6341 - protein, 8 aa, synthetic construct
  REGION 1..8: note = Amino acid sequence
QQYDNLWT

SEQ ID NO: 6342 - protein, 12 aa, synthetic construct
  REGION 1..12: note = Amino acid sequence
QVWDSSSDHLYV

SEQ ID NO: 6343 - protein, 9 aa, synthetic construct
  REGION 1..9: note = Amino acid sequence
HQYGSSPRT

SEQ ID NO: 6344 - protein, 12 aa, synthetic construct
  REGION 1..12: note = Amino acid sequence
GTWDSSLTGGFV

SEQ ID NO: 6345 - protein, 11 aa, synthetic construct
  REGION 1..11: note = Amino acid sequence
QVWDTSNDVGV

SEQ ID NO: 6346 - protein, 9 aa, synthetic construct
  REGION 1..9: note = Amino acid sequence
QQYGSSPPT

SEQ ID NO: 6347 - protein, 10 aa, synthetic construct
  REGION 1..10: note = Amino acid sequence
CSYAGSSNWV

SEQ ID NO: 6348 - protein, 8 aa, synthetic construct
  REGION 1..8: note = Amino acid sequence
MQGTHWSA

SEQ ID NO: 6349 - protein, 11 aa, synthetic construct
  REGION 1..11: note = Amino acid sequence
AAWDDSLSGQV

SEQ ID NO: 6350 - protein, 10 aa, synthetic construct
  REGION 1..10: note = Amino acid sequence
NSRDSSGNHV

SEQ ID NO: 6351 - protein, 8 aa, synthetic construct
  REGION 1..8: note = Amino acid sequence
QQSYSTPT

SEQ ID NO: 6352 - protein, 11 aa, synthetic construct
  REGION 1..11: note = Amino acid sequence
QVWESGGDHPV

SEQ ID NO: 6353 - protein, 9 aa, synthetic construct
  REGION 1..9: note = Amino acid sequence
LQHNNYPLT

SEQ ID NO: 6354 - protein, 9 aa, synthetic construct
  REGION 1..9: note = Amino acid sequence
QQYNSYPYT

SEQ ID NO: 6355 - protein, 9 aa, synthetic construct
  REGION 1..9: note = Amino acid sequence
MQALQIPRT

SEQ ID NO: 6356 - protein, 9 aa, synthetic construct
  REGION 1..9: note = Amino acid sequence
QAWDSNVHV

SEQ ID NO: 6357 - protein, 11 aa, synthetic construct
  REGION 1..11: note = Amino acid sequence
YSTDSSGNVWV

SEQ ID NO: 6358 - protein, 11 aa, synthetic construct
  REGION 1..11: note = Amino acid sequence
NSRDSSGNLYV

SEQ ID NO: 6359 - protein, 9 aa, synthetic construct
  REGION 1..9: note = Amino acid sequence
QQYYSSPLT

SEQ ID NO: 6360 - protein, 10 aa, synthetic construct
  REGION 1..10: note = Amino acid sequence
MQALQTPPYT

SEQ ID NO: 6361 - protein, 10 aa, synthetic construct
  REGION 1..10: note = Amino acid sequence
SSYTSSSTWV

SEQ ID NO: 6362 - protein, 9 aa, synthetic construct
  REGION 1..9: note = Amino acid sequence
QQSYSTPYT

SEQ ID NO: 6363 - protein, 11 aa, synthetic construct
  REGION 1..11: note = Amino acid sequence
CSYAGSSTPWV

SEQ ID NO: 6364 - protein, 11 aa, synthetic construct
  REGION 1..11: note = Amino acid sequence
YSPDSSGNVWV

SEQ ID NO: 6365 - protein, 5 aa, synthetic construct
  REGION 1..5: note = Amino acid sequence
QSRGT

SEQ ID NO: 6366 - protein, 9 aa, synthetic construct
  REGION 1..9: note = Amino acid sequence
QQYGSSHYT

SEQ ID NO: 6367 - protein, 12 aa, synthetic construct
  REGION 1..12: note = Amino acid sequence
QVWDSSSDHPWV

SEQ ID NO: 6368 - protein, 11 aa, synthetic construct
  REGION 1..11: note = Amino acid sequence
CSYRSSTAPVV

SEQ ID NO: 6369 - protein, 9 aa, synthetic construct
  REGION 1..9: note = Amino acid sequence
QQYFSTPWT

SEQ ID NO: 6370 - protein, 11 aa, synthetic construct
  REGION 1..11: note = Amino acid sequence
QVWDGYSDPLV

SEQ ID NO: 6371 - protein, 9 aa, synthetic construct
  REGION 1..9: note = Amino acid sequence
QQSYYTPPT

SEQ ID NO: 6372 - protein, 12 aa, synthetic construct
  REGION 1..12: note = Amino acid sequence
AAWDDSLNGLWV

SEQ ID NO: 6373 - protein, 10 aa, synthetic construct
  REGION 1..10: note = Amino acid sequence
QSSDSNNHVV

SEQ ID NO: 6374 - protein, 11 aa, synthetic construct
  REGION 1..11: note = Amino acid sequence
QSYDSSLSGVL

SEQ ID NO: 6375 - protein, 9 aa, synthetic construct
  REGION 1..9: note = Amino acid sequence
QQSYSTPFT

SEQ ID NO: 6376 - protein, 9 aa, synthetic construct
  REGION 1..9: note = Amino acid sequence
QQYDSLPLT

SEQ ID NO: 6377 - protein, 10 aa, synthetic construct
  REGION 1..10: note = Amino acid sequence
QYYGGSPGFT

SEQ ID NO: 6378 - protein, 10 aa, synthetic construct
  REGION 1..10: note = Amino acid sequence
CSYAGSSTYV

SEQ ID NO: 6379 - protein, 10 aa, synthetic construct
  REGION 1..10: note = Amino acid sequence
QEYVKSPGFA

SEQ ID NO: 6380 - protein, 9 aa, synthetic construct
  REGION 1..9: note = Amino acid sequence
QQYGTSPQT

SEQ ID NO: 6381 - protein, 10 aa, synthetic construct
  REGION 1..10: note = Amino acid sequence
MLYMGSGISL

SEQ ID NO: 6382 - protein, 12 aa, synthetic construct
  REGION 1..12: note = Amino acid sequence
QSNDISLSGSVV

SEQ ID NO: 6383 - protein, 11 aa, synthetic construct
  REGION 1..11: note = Amino acid sequence
QSYDNSLSGGV

SEQ ID NO: 6384 - protein, 9 aa, synthetic construct
  REGION 1..9: note = Amino acid sequence
QQFDISPFT

SEQ ID NO: 6385 - protein, 10 aa, synthetic construct
  REGION 1..10: note = Amino acid sequence
SSYTSSSSLV

SEQ ID NO: 6386 - protein, 10 aa, synthetic construct
  REGION 1..10: note = Amino acid sequence
CSFTGTSTFV

SEQ ID NO: 6387 - protein, 9 aa, synthetic construct
  REGION 1..9: note = Amino acid sequence
QQYYSTPYT

SEQ ID NO: 6388 - protein, 11 aa, synthetic construct
  REGION 1..11: note = Amino acid sequence
ATWDDSLNGGV

SEQ ID NO: 6389 - protein, 9 aa, synthetic construct
  REGION 1..9: note = Amino acid sequence
WLISGGAPV

SEQ ID NO: 6390 - protein, 11 aa, synthetic construct
  REGION 1..11: note = Amino acid sequence
QSFDSSLSRSV

SEQ ID NO: 6391 - protein, 9 aa, synthetic construct
  REGION 1..9: note = Amino acid sequence
QQRNNWPIT

SEQ ID NO: 6392 - protein, 9 aa, synthetic construct
  REGION 1..9: note = Amino acid sequence
LQDYNYPPT

SEQ ID NO: 6393 - protein, 11 aa, synthetic construct
  REGION 1..11: note = Amino acid sequence
NSRDSSGHHWV

SEQ ID NO: 6394 - protein, 9 aa, synthetic construct
  REGION 1..9: note = Amino acid sequence
QQYYSTPYT

SEQ ID NO: 6395 - protein, 10 aa, synthetic construct
  REGION 1..10: note = Amino acid sequence
MQGAHWPPIT

SEQ ID NO: 6396 - protein, 10 aa, synthetic construct
  REGION 1..10: note = Amino acid sequence
YSTDTIGNWV

SEQ ID NO: 6397 - protein, 11 aa, synthetic construct
  REGION 1..11: note = Amino acid sequence
QVWDSSSDHWI

SEQ ID NO: 6398 - protein, 9 aa, synthetic construct
  REGION 1..9: note = Amino acid sequence
QQSYSPPLT

SEQ ID NO: 6399 - protein, 10 aa, synthetic construct
  REGION 1..10: note = Amino acid sequence
QHYSDWRALT

SEQ ID NO: 6400 - protein, 9 aa, synthetic construct
  REGION 1..9: note = Amino acid sequence
QQYYGPLWT

SEQ ID NO: 6401 - protein, 11 aa, synthetic construct
  REGION 1..11: note = Amino acid sequence
QSADSSLTYWL

SEQ ID NO: 6402 - protein, 8 aa, synthetic construct
  REGION 1..8: note = Amino acid sequence
QQYSDYST

SEQ ID NO: 6403 - protein, 9 aa, synthetic construct
  REGION 1..9: note = Amino acid sequence
HQYYTTPFT

SEQ ID NO: 6404 - protein, 9 aa, synthetic construct
  REGION 1..9: note = Amino acid sequence
QAWDSSTAE

SEQ ID NO: 6405 - protein, 11 aa, synthetic construct
  REGION 1..11: note = Amino acid sequence
VTWDDDLHGWV

SEQ ID NO: 6406 - protein, 13 aa, synthetic construct
  REGION 1..13: note = Amino acid sequence
ATWDSSLRAGPVV

SEQ ID NO: 6407 - protein, 9 aa, synthetic construct
  REGION 1..9: note = Amino acid sequence
QQYNAYPVT

SEQ ID NO: 6408 - protein, 9 aa, synthetic construct
  REGION 1..9: note = Amino acid sequence
QQYYSTPWT

SEQ ID NO: 6409 - protein, 9 aa, synthetic construct
  REGION 1..9: note = Amino acid sequence
QQYYSPPLT

SEQ ID NO: 6410 - protein, 10 aa, synthetic construct
  REGION 1..10: note = Amino acid sequence
CSYTSSLTYV

SEQ ID NO: 6411 - protein, 9 aa, synthetic construct
  REGION 1..9: note = Amino acid sequence
MQGTHWPYT

SEQ ID NO: 6412 - protein, 9 aa, synthetic construct
  REGION 1..9: note = Amino acid sequence
QAWDSSTYV

SEQ ID NO: 6413 - protein, 10 aa, synthetic construct
  REGION 1..10: note = Amino acid sequence
QQYGGSPLFT

SEQ ID NO: 6414 - protein, 9 aa, synthetic construct
  REGION 1..9: note = Amino acid sequence
QTWDSSTVI

SEQ ID NO: 6415 - protein, 9 aa, synthetic construct
  REGION 1..9: note = Amino acid sequence
MQALQTPYT

SEQ ID NO: 6416 - protein, 11 aa, synthetic construct
  REGION 1..11: note = Amino acid sequence
GTWDSSLSAGV

SEQ ID NO: 6417 - protein, 8 aa, synthetic construct
  REGION 1..8: note = Amino acid sequence
QQYNSYWT

SEQ ID NO: 6418 - protein, 9 aa, synthetic construct
  REGION 1..9: note = Amino acid sequence
QQYNSYPWT

SEQ ID NO: 6419 - protein, 12 aa, synthetic construct
  REGION 1..12: note = Amino acid sequence
QSYDSSLSGSGV

SEQ ID NO: 6420 - protein, 10 aa, synthetic construct
  REGION 1..10: note = Amino acid sequence
QSADSSGTYV

SEQ ID NO: 6421 - protein, 9 aa, synthetic construct
  REGION 1..9: note = Amino acid sequence
QQAHGFPIT

SEQ ID NO: 6422 - protein, 8 aa, synthetic construct
  REGION 1..8: note = Amino acid sequence
QQYNSWPA

SEQ ID NO: 6423 - protein, 9 aa, synthetic construct
  REGION 1..9: note = Amino acid sequence
QQSYNTPYT

SEQ ID NO: 6424 - protein, 9 aa, synthetic construct
  REGION 1..9: note = Amino acid sequence
QQSYNTPLT

SEQ ID NO: 6425 - protein, 10 aa, synthetic construct
  REGION 1..10: note = Amino acid sequence
QQYGSSPPNS

SEQ ID NO: 6426 - protein, 11 aa, synthetic construct
  REGION 1..11: note = Amino acid sequence
QVWDSSSDHPV

SEQ ID NO: 6427 - protein, 10 aa, synthetic construct
  REGION 1..10: note = Amino acid sequence
QSYDSNTHWV

SEQ ID NO: 6428 - protein, 9 aa, synthetic construct
  REGION 1..9: note = Amino acid sequence
MQALETPRT

SEQ ID NO: 6429 - protein, 8 aa, synthetic construct
  REGION 1..8: note = Amino acid sequence
QQYNSYST

SEQ ID NO: 6430 - protein, 9 aa, synthetic construct
  REGION 1..9: note = Amino acid sequence
MQALQPPYT

SEQ ID NO: 6431 - protein, 10 aa, synthetic construct
  REGION 1..10: note = Amino acid sequence
QQSYSTPPWT

SEQ ID NO: 6432 - protein, 9 aa, synthetic construct
  REGION 1..9: note = Amino acid sequence
QQYYLVPVT

SEQ ID NO: 6433 - protein, 12 aa, synthetic construct
  REGION 1..12: note = Amino acid sequence
AAWDDSLSGPYV

SEQ ID NO: 6434 - protein, 11 aa, synthetic construct
  REGION 1..11: note = Amino acid sequence
SSYAGSNNFYV

SEQ ID NO: 6435 - protein, 12 aa, synthetic construct
  REGION 1..12: note = Amino acid sequence
QSYDSSLSGSMI

SEQ ID NO: 6436 - protein, 8 aa, synthetic construct
  REGION 1..8: note = Amino acid sequence
MIWSSLVV

SEQ ID NO: 6437 - protein, 9 aa, synthetic construct
  REGION 1..9: note = Amino acid sequence
MQALQTPWT

SEQ ID NO: 6438 - protein, 9 aa, synthetic construct
  REGION 1..9: note = Amino acid sequence
LQNYNYPWT

SEQ ID NO: 6439 - protein, 9 aa, synthetic construct
  REGION 1..9: note = Amino acid sequence
MQGIHLPRT
